(19) United States
(12) Patent Application Publication
(10) Pub. No.: US 2004/0191819 A1
(43) Pub. Date: Sep. 30, 2004

(54) Expression profiles for breast cancer and methods of use

(75) Inventors: Deepa Eveleigh, West Haven, CT (US); Douglas Bigwood, Madison, CT (US)

Correspondence Address: JEFFREY M. GREENMAN, BAYER PHARMACEUTICALS CORPORATION, 400 MORGAN LANE, WEST HAVEN, CT, 06516, US

(73) Assignee: Bayer Pharmaceuticals Corporation, West Haven, CT

(21) Appl. No.: 10/788,792

(22) Filed: Feb. 27, 2004

Related U.S. Application Data
(60) Provisional application No. 60/450,655, filed on Feb. 28, 2003.

(51) Int. Cl. C12Q 1/68; G01N 33/574

(52) U.S. Cl. 435/6; 435/7.23

(57) ABSTRACT

The present invention relates to gene expression profiles for breast cancer, microarrays comprising nucleic acid sequences representing gene expression profiles, and methods of using expression profiles and microarrays. The invention also provides methods and compositions for diagnostic assays for detecting cancer and therapeutic methods and compositions for treating cancer. The invention also provides methods for designing, identifying, and optimizing therapeutics for cancer.

[0001] This application claims benefit of U.S. Provisional Application Serial No. 60/450,655, Feb. 28, 2003, the contents of which are incorporated herein by reference in their entirety.

### FIELD OF THE INVENTION

[0002] The present invention relates to gene expression profiles for breast cancer, microarrays comprising nucleic acid sequences representing gene expression profiles, and methods of using expression profiles and microarrays.

### BACKGROUND OF THE INVENTION

[0003] Many disease states are characterized by differences in the expression levels of various genes either through changes in the copy number of the genetic DNA or through changes in levels of transcription of particular genes (e.g., through control of initiation, provision of RNA precursors, RNA processing, etc.). For example, losses and gains of genetic material play an important role in malignant transformation and progression. These gains and losses are thought to be “driven” by at least two kinds of genes, oncogenes and tumor suppressor genes. Oncogenes are positive regulators of tumorgenesis, while tumor suppressor genes are negative regulators of tumorgenesis (Marshall, Cell 64:313-326, 1991; Weinberg, Science 254:1138-1146, 1991). Therefore, one mechanism of activating unregulated growth is to increase the number of genes coding for oncogene proteins or to increase the level of expression of these oncogenes (e.g., in response to cellular or environmental changes), and another mechanism is to lose genetic material or to decrease the level of expression of genes that code for tumor suppressors. This model is supported by the losses and gains of genetic material associated with glioma progression (Mikkelson, et al., J. Cellular Biochem. 46:3-8, 1991). Thus, changes in the expression (transcription) levels of particular genes (e.g., oncogenes or tumor suppressors) serve as signposts for the presence and progression of various cancers.

[0004] Compounds which are used as therapeutics to treat these various diseases (e.g., cancer) presumably reverse some, or all, of these gene expression changes. The expression change of at least some of these genes may therefore, be used as a method to monitor, or even predict, the efficacy of such therapeutics. The analysis of these expression changes may be performed in the target tissue of interest (e.g., tumor) or in some surrogate cell population (e.g., peripheral blood leukocytes). In the latter case, correlation of the gene expression changes with efficacy (e.g., tumor shrinkage or non-growth) must be especially strong for the expression change pattern to be used as a marker for efficacy.

[0005] A number of laboratories have reported success in using gene expression analysis, via microarrays or other methods, to classify human tumors at the molecular level (Bittner, et al., Nature 406:536-540, 2000; Alon, et al., Proc. Natl. Acad. Sci. USA 96:6745-6750, 1999; Alizadeh, et al., Nature 403:503-511, 2000; Golub, et al., Science 286:531-537, 1999; Perou, et al., Proc. Natl. Acad. Sci. 96:9212-9217, 1999; Kahn, et al., Am. J. Pathol. 156:1887-1900, 2000). Genes, either individually or as a subset, identified in this way may be used as markers that could be tracked for changes that correlate with efficacy of a therapeutic compound(s) or to predict which patients might benefit from a particular therapeutic. Total RNA was isolated from ten human breast tumors and from normal adjacent tissue (NAT), and the RNA was analyzed from each sample using Affymetrix technology.

### SUMMARY OF THE INVENTION

[0006] The present invention relates to gene expression profiles for breast cancer, microarrays comprising nucleic acid sequences or amino acid sequences representing expression profiles, and methods of using expression profiles and microarrays.

[0007] In one embodiment of the present invention, the gene expression profile is an expression profile comprising one or more genes (e.g., SEQ ID NOs: 1-127) that demonstrate altered expression in human breast tumors versus normal adjacent tissue (NAT).

[0008] In another embodiment, the expression profile is an expression profile comprising one or more polypeptides (e.g., SEQ ID NOs: 128-254) that demonstrate altered expression in human breast tumors versus normal adjacent tissue (NAT).

[0009] In further embodiment of the present invention, the gene expression profile may be an expression profile comprising one or more genes selected from the group consisting of the genes listed in the Table 1 to 3. In another embodiment of the present invention, the gene expression profiles comprise one or more biomarkers isolated from the group comprising the genes listed in the Tables.

[0010] The present invention is also directed to the discovery of the gene expression profile of human breast tumors and normal adjacent tissue. As described in the Examples and in the Tables, human breast tumors have genes which are expressed at higher levels (i.e., which are up-regulated) and genes which are expressed at lower levels (i.e., which are down-regulated) relative to normal adjacent tissue. Sets of genes which are up-regulated or down-regulated are referred to herein as “genes characteristic of human breast tumor tissue.”

[0011] Also within the scope of the present invention are microarrays comprising one or more genes that demonstrate altered expression in human breast tumor tissue. In another embodiment of the present invention, the microarray may be a microarray comprising one or more genes selected from the group consisting of the genes listed in the Tables. In a further embodiment, the microarray may be a microarray comprising one or more biomarkers isolated from the group comprising the genes listed in the Tables.

[0012] In addition, it is an objective of the invention to provide methods and reagents for the prediction, diagnosis, prognosis, and therapy of cancer.

[0013] This invention also relates to methods for using said microarrays which include, but are not limited to, screening the effects of a drug or treatment on tissue or cell samples, screening toxicity effects on tissue or cell samples, identifying a disease state in a tissue or cell sample, providing a patient diagnosis, predicting a patient's response to treatment, distinguishing between control and drug-treated samples, distinguishing between normal and tumor samples, discovering novel drugs, and determining the level of gene expression in a tissue or cell sample.

[0014] Another embodiment of the present invention is a method for screening the effects of a drug on a tissue or cell sample comprising the step of analyzing the level of expression of one or more genes (e.g., SEQ ID NOs: 1-127) and/or gene products (e.g., SEQ ID NOs: 128-254), wherein the gene expression and/or gene product levels in the tissue or cell sample are analyzed before and after exposure to the drug, and a variation in the expression level of the gene and/or gene product is indicative of a drug effect or provides a patient diagnosis or predicts a patient's response to the treatment.

[0015] Another aspect of the present invention is a method for discovering novel drugs comprising the step of analyzing the level of expression of one or more genes and/or gene products, wherein the gene expression and/or gene product levels of the cells are analyzed before and after exposure to the drug, and a variation in the expression level of the gene and/or gene product is indicative of drug efficacy.

[0016] The invention further provides a method for identifying a compound useful for the treatment of cancer comprising administering to a subject with cancer a test compound, and measuring the activity of the polypeptide (e.g., the polypeptides encoded by SEQ ID NOs: 128-254), wherein a change in the activity of the polypeptide is indicative of the test compound being useful for the treatment of cancer.

[0017] The invention, thus, provides methods which may be used to identify compounds which may act, for example, as regulators or modulators such as agonists and antagonists, partial agonists, inverse agonists, activators, co-activators, and inhibitors. Accordingly, the invention provides reagents and methods for regulating the expression of a polynucleotide or a polypeptide associated with cancer. Reagents that modulate the expression, stability, or amount of a polynucleotide or the activity of the polypeptide may be a protein, a peptide, a peptidomimetic, a nucleic acid, a nucleic acid analogue (e.g., peptide nucleic acid, locked nucleic acid), or a small molecule.

[0018] The present invention also provides a method for providing a patient diagnosis comprising the step of analyzing the level of expression of one or more genes and/or gene products, wherein the gene expression and/or gene product levels of normal and patient samples are analyzed, and a variation in the expression level of the gene and/or gene product in the patient sample is diagnostic of a disease. The patient samples include, but are not limited to, blood, amniotic fluid, plasma, semen, bone marrow, and tissue biopsy.

[0019] The present invention still further provides a method of diagnosing cancer in a subject comprising measuring the activity of the polypeptide in a subject suspected of having cancer, wherein if there is a difference in the activity of the polypeptide, relative to the activity of the polypeptide in a subject not suspected of having cancer, then the subject is diagnosed has having cancer.

[0020] In another embodiment, the invention provides a method for detecting cancer in a patient sample in which an antibody to a protein is used to react with proteins in the patient sample.

[0021] Another aspect of the present invention is a method for distinguishing between normal and disease states comprising the step of analyzing the level of expression of one or more genes and/or gene products, wherein the gene expression and/or gene product levels of normal and disease tissues are analyzed, and a variation in the expression level of the gene and/or gene product is indicative of a disease state.

[0022] In another embodiment, the invention pertains to a method of determining the phenotype of cells comprising detecting the differential expression, relative to normal cells, of at least one gene, wherein the gene is differentially expressed by at least a factor of two, at least a factor of five, at least a factor of twenty, or at least a factor of fifty.

[0023] In yet another embodiment, the invention pertains to a method of determining the phenotype of cells, comprising detecting the differential expression, relative to normal cells, of at least one polypeptide, wherein the protein is differentially expressed by at least a factor of two, at least a factor of five, at least a factor of twenty, an up to at least a factor of fifty.

[0024] In another embodiment, the invention pertains to a method for determining the phenotype of cells from a patient by providing a nucleic acid probe comprising a nucleotide sequence having at least about 10, at least about 15, at least about 25, or at least about 40 consecutive nucleotides, obtaining a sample of cells from a patient, optionally providing a second sample of cells substantially all of which are non-cancerous, contacting the nucleic acid probe under stringent conditions with mRNA of each of said first and second cell samples, and comparing (a) the amount of hybridization of the probe with mRNA of the first cell sample, with (b) the amount of hybridization of the probe with mRNA of the second cell sample, wherein a difference of at least a factor of two, at least a factor of five, at least a factor of twenty, or at least a factor of fifty in the amount of hybridization with the mRNA of the first cell sample as compared to the amount of hybridization with the mRNA of the second cell sample is indicative of the phenotype of cells in the first cell sample.

[0025] In another embodiment, the invention provides a test kit for identifying the presence of cancerous cells or tissues, comprising a probe/primer, for measuring a level of a nucleic acid in a sample of cells isolated from a patient. In certain embodiments, the kit may further include instructions for using the kit, solutions for suspending or fixing the cells, detectable tags or labels, solutions for rendering a nucleic acid susceptible to hybridization, solutions for lysing cells, or solutions for the purification of nucleic acids.

[0026] In one embodiment, the invention provides a test kit for identifying the presence of cancer cells or tissues, comprising an antibody specific for a protein. In certain embodiments, the kit further includes instructions for using the kit. In certain embodiments, the kit may further include solutions for suspending or fixing the cells, detectable tags or labels, solutions for rendering a polypeptide susceptible to the binding of an antibody, solutions for lysing cells, or solutions for the purification of polypeptides.

[0027] In another embodiment, the invention provides a test kit for monitoring the efficacy of a compound or therapeutic in cancerous cells or tissues, comprising a probe/primer, for measuring a level of a nucleic acid in a sample of cells isolated from a patient. In certain embodiments, the kit may further include instructions for using the kit, solutions for suspending or fixing the cells, detectable tags or labels, solutions for rendering a nucleic acid susceptible to hybridization, solutions for lysing cells, or solutions for the purification of nucleic acids.

[0028] In one embodiment, the invention provides a test kit for monitoring the efficacy of a compound or therapeutic in cancer cells or tissues, comprising an antibody specific for a protein. In certain embodiments, the kit further includes instructions for using the kit. In certain embodiments, the kit may further include solutions for suspending or fixing the cells, detectable tags or labels, solutions for rendering a polypeptide susceptible to the binding of an antibody, solutions for lysing cells, or solutions for the purification of polypeptides.

[0029] This invention is also related to methods of identifying biomarkers comprising the steps of selecting a set of biomarker genes from a gene expression profile representing a disease or drug treatment

### DETAILED DESCRIPTION OF THE INVENTION

[0030] It is to be understood that this invention is not limited to the particular methodology, protocols, cell lines, animal species or genera, constructs, and reagents described and as such may vary. It is also to be understood that the terminology used herein is for the purpose of describing particular embodiments only, and is not intended to limit the scope of the present invention which will be limited only by the appended claims.

[0031] It must be noted that as used herein and in the appended claims, the singular forms “a,” “and,” and “the” include plural reference unless the context clearly dictates otherwise. Thus, for example, reference to “a gene” is a reference to one or more genes and includes equivalents thereof known to those skilled in the art, and so forth.

[0032] Unless defined otherwise, all technical and scientific terms used herein have the same meaning as commonly understood to one of ordinary skill in the art to which this invention belongs. Any methods, devices, and materials similar or equivalent to those described herein can be used in the practice or testing of the invention, and examples of such methods, devices and materials are described below.

[0033] All publications and patents mentioned herein are hereby incorporated herein by reference for the purpose of describing and disclosing, for example, the constructs and methodologies that are described in the publications which might be used in connection with the presently described invention. The publications discussed above and throughout the text are provided solely for their disclosure prior to the filing date of the present application. Nothing herein is to be construed as an admission that the inventors are not entitled to antedate such disclosure by virtue of prior invention.

### Definitions

[0034] For convenience, the meaning of certain terms and phrases employed in the specification, examples, and appended claims are provided below.

[0035] The phrase “a corresponding normal cell of” or “normal cell corresponding to” or “normal counterpart cell of” a diseased cell refers to a normal cell of the same type as that of the diseased cell.

[0036] An “address” on an array (e.g., a microarray) refers to a location at which an element, for example, an oligonucleotide, is attached to the solid surface of the array.

[0037] The term “agonist,” as used herein, is meant to refer to an agent that mimics or up-regulates (e.g., potentiates or supplements) the bioactivity of a protein. An agonist may be a wild-type protein or derivative thereof having at least one bioactivity of the wild-type protein. An agonist may also be a compound that up-regulates expression of a gene or which increases at least one bioactivity of a protein. An agonist can also be a compound which increases the interaction of a polypeptide with another molecule, for example, a target peptide or nucleic acid.

[0038] “Amplification,” as used herein, relates to the production of additional copies of a nucleic acid sequence. For example, amplification may be carried out using polymerase chain reaction (PCR) technologies which are well known in the art. (see, e.g., Dieffenbach, C. W. and G. S. Dveksler (1995) PCR Primer, A Laboratory Manual, Cold Spring Harbor Press, Plainview, N.Y.)

[0039] “Antagonist,” as used herein, is meant to refer to an agent that down-regulates (e.g., suppresses or inhibits) at least one bioactivity of a protein. An antagonist may be a compound which inhibits or decreases the interaction between a protein and another molecule, for example, a target peptide or enzyme substrate. An antagonist may also be a compound that down-regulates expression of a gene or which reduces the amount of expressed protein present.

[0040] The term “antibody,” as used herein, is intended to include whole antibodies, for example, of any isotype (IgG, IgA, IgM, IgE, etc.), and includes fragments thereof which are also specifically reactive with a vertebrate (e.g., mammalian) protein. Antibodies may be fragmented using conventional techniques and the fragments screened for utility in the same manner as described above for whole antibodies. Thus, the term includes segments of proteolytically-cleaved or recombinantly-prepared portions of an antibody molecule that are capable of selectively reacting with a certain protein. Non-limiting examples of such proteolytic and/or recombinant fragments include Fab, F(ab′)2, Fab′, Fv, and single chain antibodies (scFv) containing a V[L] and/or V[H] domain joined by a peptide linker. The scFv's may be covalently or non-covalently linked to form antibodies having two or more binding sites. The subject invention includes polyclonal, monoclonal, or other purified preparations of antibodies and recombinant antibodies.

[0041] The terms “array” or “matrix” refer to an arrangement of addressable locations or “addresses” on a device. The locations can be arranged in two-dimensional arrays, three-dimensional arrays, or other matrix formats. The number of locations may range from several to at least hundreds of thousands. Most importantly, each location represents a totally independent reaction site. A “nucleic acid array” refers to an array containing nucleic acid probes, such as oligonucleotides or larger portions of genes. The nucleic acid on the array may be single-stranded. Arrays wherein the probes are oligonucleotides are referred to as “oligonucleotide arrays” or “oligonucleotide chips.” A “microarray,” also referred to herein as a “biochip” or “biological chip,” is an array of regions having a density of discrete regions of, for example, at least about 100/cm², or at least about 1000/cm². The regions in a microarray have typical dimensions, for example, diameters, in the range of between about 10-250 μm, and are separated from other regions in the array by about the same distance.

[0042] “Biological activity,” “bioactivity,” “activity,” or “biological function,” which are used interchangeably, herein mean an effector or antigenic function that is directly or indirectly performed by a polypeptide (whether in its native or denatured conformation), or by any subsequence thereof. Biological activities include binding to polypeptides, binding to other proteins or molecules, activity as a DNA binding protein, as a transcription regulator, ability to bind damaged DNA, etc. A bioactivity can be modulated by directly affecting the subject polypeptide. Alternatively, a bioactivity can be altered by modulating the level of the polypeptide, such as by modulating expression of the corresponding gene.

[0043] The term “biological sample,” as used herein, refers to a sample obtained from an organism or from components (e.g., cells) of an organism. The sample may be of any biological tissue or fluid. The sample may be a “clinical sample” which is a sample derived from a patient. Such samples include, but are not limited to, sputum, blood, blood cells (e.g., white cells), tissue or fine needle biopsy samples, urine, peritoneal fluid, and pleural fluid, or cells therefrom. Biological samples may also include sections of tissues such as frozen sections taken for histological purposes.

[0044] The term “biomarker” or “marker” encompasses a broad range of intra- and extra-cellular events as well as whole-organism physiological changes. Biomarkers may be represent essentially any aspect of cell function, for example, but not limited to, levels or rate of production of signaling molecules, transcription factors, metabolites, gene transcripts as well as post-translational modifications of proteins. Biomarkers may include whole genome analysis of transcript levels or whole proteome analysis of protein levels and/or modifications.

[0045] A biomarker may also refer to a gene or gene product which is up- or down-regulated in a compound-treated, diseased cell of a subject having the disease compared to an untreated diseased cell. That is, the gene or gene product is sufficiently specific to the treated cell that it may be used, optionally with other genes or gene products, to identify, predict, or detect efficacy of a small molecule. Thus, a biomarker is a gene or gene product that is characteristic of efficacy of a compound in a diseased cell or the response of that diseased cell to treatment by the compound.

[0046] A nucleotide sequence is “complementary” to another nucleotide sequence if each of the bases of the two sequences match, that is, are capable of forming Watson-Crick base pairs. The term “complementary strand” is used herein interchangeably with the term “complement.” The complement of a nucleic acid strand may be the complement of a coding strand or the complement of a non-coding strand.

[0047] “Detection agents of genes” refers to agents that can be used to specifically detect the gene or other biological molecules relating to it, for example, RNA transcribed from the gene or polypeptides encoded by the gene. Exemplary detection agents are nucleic acid probes, which hybridize to nucleic acids corresponding to the gene, and antibodies.

[0048] “Differential gene expression pattern” between cell A and cell B refers to a pattern reflecting the differences in gene expression between cell A and cell B. A differential gene expression pattern may also be obtained between a cell at one time point and a cell at another time point, or between a cell incubated or contacted with a compound and a cell that has not been incubated with or contacted with the compound.

[0049] The term “cancer” includes, but is not limited to, solid tumors, such as cancers of the breast, respiratory tract, brain, reproductive organs, digestive tract, urinary tract, eye, liver, skin, head and neck, thyroid, parathyroid, and their distant metastases. The term also includes lymphomas, sarcomas, and leukemias.

[0050] Examples of breast cancer include, but are not limited to, invasive ductal carcinoma, invasive lobular carcinoma, ductal carcinoma in situ, and lobular carcinoma in situ.

[0051] Examples of cancers of the respiratory tract include, but are not limited to, small-cell and non-small-cell lung carcinoma, as well as bronchial adenoma and pleuropulmonary blastoma.

[0052] Examples of brain cancers include, but are not limited to, brain stem and hypophtalmic glioma, cerebellar and cerebral astrocytoma, medulloblastoma, ependymoma, as well as neuroectodermal and pineal tumor.

[0053] Tumors of the male reproductive organs include, but are not limited to, prostate and testicular cancer. Tumors of the female reproductive organs include, but are not limited to, endometrial, cervical, ovarian, vaginal, and vulvar cancer, as well as sarcoma of the uterus.

[0054] Tumors of the digestive tract include, but are not limited to, anal, colon, colorectal, esophageal, gallbladder, gastric, pancreatic, rectal, small-intestine, and salivary gland cancers.

[0055] Tumors of the urinary tract include, but are not limited to, bladder, penile, kidney, renal pelvis, ureter, and urethral cancers.

[0056] Eye cancers include, but are not limited to, intraocular melanoma and retinoblastoma.

[0057] Examples of liver cancers include, but are not limited to, hepatocellular carcinoma (liver cell carcinomas with or without fibrolamellar variant), cholangiocarcinoma (intrahepatic bile duct carcinoma), and mixed hepatocellular cholangiocarcinoma.

[0058] Skin cancers include, but are not limited to, squamous cell carcinoma, Kaposi's sarcoma, malignant melanoma, Merkel cell skin cancer, and non-melanoma skin cancer.

[0059] Head-and-neck cancers include, but are not limited to, laryngeal/hypopharyngeal/nasopharyngeal/oropharyngeal cancer, and lip and oral cavity cancer.

[0060] Lymphomas include, but are not limited to, AIDS-related lymphoma, non-Hodgkin's lymphoma, cutaneous T-cell lymphoma, Hodgkin's disease, and lymphoma of the central nervous system.

[0061] Sarcomas include, but are not limited to, sarcoma of the soft tissue, osteosarcoma, malignant fibrous histiocytoma, lymphosarcoma, and rhabdomyosarcoma.

[0062] Leukemias include, but are not limited to, acute myeloid leukemia, acute lymphoblastic leukemia, chronic lymphocytic leukemia, chronic myelogenous leukemia, and hairy cell leukemia.

[0063] “A diseased cell of cancer” refers to a cell present in subjects having cancer. That is, a cell which is a modified form of a normal cell and is not present in a subject not having cancer, or a cell which is present in significantly higher or lower numbers in subjects having cancer relative to subjects not having cancer.

[0064] The term “equivalent” is understood to include nucleotide sequences encoding functionally equivalent polypeptides. Equivalent nucleotide sequences may include sequences that differ by one or more nucleotide substitutions, additions, or deletions, such as allelic variants; and may, therefore, include sequences that differ from the nucleotide sequence of the nucleic acids referred to in the Tables due to the degeneracy of the genetic code.

[0065] The term “expression profile,” which is used interchangeably herein with “gene expression profile” and “fingerprint” of a cell refers to a set of values representing mRNA levels of one or more genes in a cell. An expression profile may comprise values representing expression levels of, for example, at least about 10 genes, or at least about 50, 100, 200 or more genes. Expression profiles may also comprise an mRNA level of a gene which is expressed at similar levels in multiple cells and conditions (e.g., a housekeeping gene such as GAPDH). For example, an expression profile of a diseased cell of cancer refers to a set of values representing mRNA levels of 10 or more genes in a diseased cell. In addition, the term “expression profile” may also include a set of values representing one or more protein or polypeptide levels in a cell.

[0066] The term “gene” refers to a nucleic acid sequence that comprises control and coding sequences necessary for the production of a polypeptide or precursor. The polypeptide can be encoded by a full length coding sequence or by any portion of the coding sequence. The gene may be derived in whole or in part from any source known to the art, including a plant, a fungus, an animal, a bacterial genome or episome, eukaryotic, nuclear or plasmid DNA, cDNA, viral DNA, or chemically synthesized DNA. A gene may contain one or more modifications in either the coding or the untranslated regions which could affect the biological activity or the chemical structure of the expression product, the rate of expression, or the manner of expression control. Such modifications include, but are not limited to, mutations, insertions, deletions, and substitutions of one or more nucleotides. The gene may constitute an uninterrupted coding sequence or it may include one or more introns, bound by the appropriate splice junctions.

[0067] “Hybridization” refers to any process by which a strand of nucleic acid binds with a complementary strand through base pairing. For example, two single-stranded nucleic acids “hybridize” when they form a double-stranded duplex. The region of double-strandedness may include the full-length of one or both of the single-stranded nucleic acids, or all of one single-stranded nucleic acid and a subsequence of the other single-stranded nucleic acid, or the region of double-strandedness may include a subsequence of each nucleic acid. Hybridization also includes the formation of duplexes which contain certain mismatches, provided that the two strands are still forming a double-stranded helix. “Stringent hybridization conditions” refers to hybridization conditions resulting in essentially specific hybridization.

[0068] The term “isolated,” as used herein, with respect to nucleic acids, such as DNA or RNA, refers to molecules separated from other DNAs or RNAs, respectively, that are present in the natural source of the macromolecule. The term “isolated” as used herein also refers to a nucleic acid or peptide that is substantially free of cellular material, viral material, culture medium when produced by recombinant DNA techniques, or chemical precursors or other chemicals when chemically synthesized. Moreover, an “isolated nucleic acid” may include nucleic acid fragments which are not naturally occurring as fragments and would not be found in the natural state. The term “isolated” is also used herein to refer to polypeptides which are isolated from other cellular proteins and is meant to encompass both purified and recombinant polypeptides.

[0069] As used herein, the terms “label” and “detectable label” refer to a molecule capable of detection, including, but not limited to, radioactive isotopes, fluorophores, chemiluminescent moieties, enzymes, enzyme substrates, enzyme cofactors, enzyme inhibitors, dyes, metal ions, ligands (e.g., biotin or haptens), and the like. The term “fluorescer” refers to a substance or a portion thereof which is capable of exhibiting fluorescence in the detectable range. Particular examples of labels which may be used in the present invention include fluorescein, rhodamine, dansyl, umbelliferone, Texas red, luminol, NADPH, alpha-beta -galactosidase, and horseradish peroxidase.

[0070] The phrase “level of expression” refers to the level of mRNA, as well as pre-mRNA nascent transcript(s), transcript processing intermediates, mature mRNA(s), and degradation products, encoded by a gene in the cell. The phrase “level of expression”also refers to the level of protein or polypeptide in a cell.

[0071] As used herein, the term “nucleic acid” refers to polynucleotides such as deoxyribonucleic acid (DNA) and, where appropriate, ribonucleic acid (RNA). The term should also be understood to include, as equivalents, analogs of either RNA or DNA made from nucleotide analogs and, as applicable to the embodiment being described, single-stranded (sense or antisense) and double-stranded polynucleotides. Chromosomes, cDNAs, mRNAs, rRNAs, and ESTs are representative examples of molecules that may be referred to as nucleic acids.

[0072] The phrase “nucleic acid corresponding to a gene” refers to a nucleic acid that can be used for detecting the gene, for example, a nucleic acid which is capable of hybridizing specifically to the gene.

[0073] The phrase “nucleic acid sample derived from RNA” refers to one or more nucleic acid molecules (e.g., RNA or DNA) that may be synthesized from the RNA, and includes DNA produced from methods using PCR (e.g., RT-PCR).

[0074] The term “oligonucleotide” as used herein refers to a nucleic acid molecule comprising, for example, from about 10 to about 1000 nucleotides. Oligonucleotides for use in the present invention may be, for example, from about 15 to about 150 nucleotides, or from about 150 to about 1000 in length. The oligonucleotide may be a naturally occurring oligonucleotide or a synthetic oligonucleotide. Oligonucleotides may be prepared by the phosphoramidite method (Beaucage and Carruthers, Tetrahedron Lett. 22:1859-62, 1981), or by the triester method (Matteucci, et al., J. Am. Chem. Soc. 103:3185, 1981), or by other chemical methods known in the art.

[0075] The term “patient” or “subject” as used herein includes mammals (e.g., humans and animals).

[0076] The term “percent identical” refers to sequence identity between two amino acid sequences or between two nucleotide sequences. For example, identity between two sequences may be determined by comparing a particular position in each sequence which may be aligned for purposes of comparison. When an equivalent position in the compared sequences is occupied by the same base or amino acid, then the molecules are identical at that position. When the equivalent site is occupied by the same or a similar amino acid residue (e.g., similar in steric and/or electronic nature), then the molecules may be referred to as homologous (similar) at that position. Expression as a percentage of homology, similarity, or identity refers to a function of the number of identical or similar amino acids at positions shared by the compared sequences. Various alignment algorithms and/or programs may be used including, for example, FASTA, BLAST, or ENTREZ. FASTA and BLAST are available as a part of the GCG sequence analysis package (University of Wisconsin, Madison, Wis.), and may be used with, for example, default settings. ENTREZ is available through the National Center for Biotechnology Information, National Library of Medicine, National Institutes of Health, Bethesda, Md. In one embodiment, the percent identity of two sequences may be determined by the GCG program with a gap weight of I (e.g., each amino acid gap is weighted as if it were a single amino acid or nucleotide mismatch between the two sequences). Other techniques for alignment are described in Methods in Enzymology (vol. 266: Computer Methods for Macromolecular Sequence Analysis (1996), ed. Doolittle, Academic Press, Inc., a division of Harcourt Brace & Co., San Diego, Calif., USA). An alignment program that permits gaps in the sequence may be utilized to align the sequences. For example, the Smith-Waterman is one type of algorithm that permits gaps in sequence alignments (see, e.g., Meth. Mol. Biol. 70:173-187, 1997). Also, the GAP program using the Needleman and Wunsch alignment method may be utilized to align sequences. An alternative search strategy uses MPSRCH software, which runs on a MASPAR computer. MPSRCH uses a Smith-Waterman algorithm to score sequences on a massively parallel computer. This approach improves the ability to detect distantly related matches, and is especially tolerant of small gaps and nucleotide sequence errors. Nucleic acid-encoded amino acid sequences may be used to search both protein and DNA databases. Databases with individual sequences are described in Methods in Enzymology, ed. Doolittle, supra. Databases include, for example, Genbank, EMBL, and DNA Database of Japan (DDBJ).

[0077] As used herein, a nucleic acid or other molecule attached to an array is referred to as a “probe” or “capture probe.” When an array contains several probes corresponding to one gene, these probes are referred to as a “gene-probe set.” A gene-probe set may consist of, for example, about 2 to about 20 probes, from about 2 to about 10 probes, or about 5 probes.

[0078] The “profile” of a cell's biological state refers to the levels of various constituents of a cell that are known to change in response to drug treatments and other perturbations of the biological state of the cell. Constituents of a cell include, for example, levels of RNA, levels of protein abundances, or protein activity levels.

[0079] The term “protein,” “polypeptide,” and “peptide” are used interchangeably herein when referring to a gene product.

[0080] An expression profile in one cell is “similar” to an expression profile in another cell when the level of expression of the genes in the two profiles are sufficiently similar that the similarity is indicative of a common characteristic, for example, the same type of cell. Accordingly, the expression profiles of a first cell and a second cell are similar when at least 75% of the genes that are expressed in the first cell are expressed in the second cell at a level that is within a factor of two relative to the first cell.

[0081] “Small molecule,” as used herein, refers to a composition with a molecular weight of less than about 5 kD. Small molecules can be nucleic acids, peptides, polypeptides, peptidomimetics, carbohydrates, lipids, or other organic or inorganic molecules. Many pharmaceutical companies have extensive libraries of chemical and/or biological mixtures, often fungal, bacterial, or algal extracts, which can be screened with any of the assays of the invention to identify compounds that modulate a bioactivity.

[0082] The term “specific hybridization” of a probe to a target site of a template nucleic acid refers to hybridization of the probe predominantly to the target, such that the hybridization signal can be clearly interpreted. As further described herein, such conditions resulting in specific hybridization vary depending on the length of the region of homology, the GC content of the region, and the melting temperature (“Tm”) of the hybrid. Thus, hybridization conditions may vary in salt content, acidity, and temperature of the hybridization solution and the washes.

[0083] A “variant” of polypeptide refers to a polypeptide having an amino acid sequence in which one or more amino acid residues is altered. The variant may have “conservative” changes, wherein a substituted amino acid has similar structural or chemical properties (e.g., replacement of leucine with isoleucine). A variant may also have “nonconservative” changes (e.g., replacement of glycine with tryptophan). Analogous minor variations may include amino acid deletions or insertions, or both. Guidance in determining which amino acid residues may be substituted, inserted, or deleted without abolishing biological or immunological activity may be identified using computer programs well known in the art, for example, LASERGENE software (DNASTAR).

[0084] The term “variant,” when used in the context of a polynucleotide sequence, may encompass a polynucleotide sequence related to that of a particular gene or the coding sequence thereof. This definition may also include, for example, “allelic,” “splice,” “species,” or “polymorphic” variants. A splice variant may have significant identity to a reference molecule, but will generally have a greater or lesser number of polynucleotides due to alternate splicing of exons during mRNA processing. The corresponding polypeptide may possess additional functional domains or an absence of domains. Species variants are polynucleotide sequences that vary from one species to another. The resulting polypeptides generally will have significant amino acid identity relative to each other. A polymorphic variant is a variation in the polynucleotide sequence of a particular gene between individuals of a given species. Polymorphic variants also may encompass “single nucleotide polymorphisms” (SNPs) in which the polynucleotide sequence varies by one base. The presence of SNPs may be indicative of, for example, a certain population, a disease state, or a propensity for a disease state.

### Microarrays for Determining the Level of Expression of Genes

[0085] Generally, determining expression profiles with microarrays involves the following steps: (a) obtaining an MRNA sample from a subject and preparing labeled nucleic acids therefrom (the “target nucleic acids” or “targets”); (b) contacting the target nucleic acids with an array under conditions sufficient for the target nucleic acids to bind to the corresponding probes on the array, for example, by hybridization or specific binding; (c) optional removal of unbound targets from the array; (d) detecting the bound targets, and (e) analyzing the results, for example, using computer based analysis methods. As used herein, “nucleic acid probes” or “probes” are nucleic acids attached to the array, whereas “target nucleic acids” are nucleic acids that are hybridized to the array. Each of these steps is described in more detail below.

[0086] Nucleic acid specimens may be obtained from an individual to be tested using either “invasive” or “non-invasive” sampling means. A sampling means is said to be “invasive” if it involves the collection of nucleic acids from within the skin or organs of an animal (including murine, human, ovine, equine, bovine, porcine, canine, or feline animal). Examples of invasive methods include blood collection, semen collection, needle biopsy, pleural aspiration, umbilical cord biopsy, etc. Examples of such methods are discussed by Kim, et al., (J. Virol. 66:3879-3882, 1992); Biswas, et al., (Ann. NY Acad. Sci. 590:582-583, 1990); and Biswas, et al., (J. Clin. Microbiol. 29:2228-2233, 1991).

[0087] In contrast, a “non-invasive” sampling means is one in which the nucleic acid molecules are recovered from an internal or external surface of the animal. Examples of such “non-invasive” sampling means include, for example, “swabbing,” collection of tears, saliva, urine, fecal material, sweat or perspiration, hair, etc.

[0088] In one embodiment of the present invention, one or more cells from the subject to be tested are obtained and RNA is isolated from the cells. In one embodiment, a sample of peripheral blood leukocytes (PBLs) cells is obtained from the subject. It is also possible to obtain a cell sample from a subject, and then to enrich the sample for a desired cell type. For example, cells may be isolated from other cells using a variety of techniques, such as isolation with an antibody binding to an epitope on the cell surface of the desired cell type. Where the desired cells are in a solid tissue, particular cells may be dissected, for example, by microdissection or by laser capture microdissection (LCM) (see, e.g., Bonner, et al., Science 278:1481, 1997; Emmert-Buck, et al., Science 274:998, 1996; Fend, et al., Am. J. Path. 154:61, 1999; and Murakami, et al., Kidney Int. 58:1346, 2000).

[0089] RNA may be extracted from tissue or cell samples by a variety of methods, for example, guanidium thiocyanate lysis followed by CsCl centrifugation (Chirgwin, et al., Biochemistry 18:5294-5299, 1979). RNA from single cells may be obtained as described in methods for preparing cDNA libraries from single cells (see, e.g., Dulac, Curr. Top. Dev. Biol. 36:245, 1998; Jena, et al., J. Immunol. Methods 190:199, 1996).

[0090] The RNA sample can be further enriched for a particular species. In one embodiment, for example, poly(A)+RNA may be isolated from an RNA sample. In particular, poly-T oligonucleotides may be immobilized on a solid support to serve as affinity ligands for mRNA. Kits for this purpose are commercially available, for example, the MessageMaker kit (Life Technologies, Grand Island, N.Y.).

[0091] In one embodiment, the RNA population may be enriched for sequences of interest, such as the genes characteristic of human breast tumor tissue (e.g., SEQ ID NOs: 1-127). Enrichment may be accomplished, for example, by primer-specific cDNA synthesis, or multiple rounds of linear amplification based on cDNA synthesis and template-directed in vitro transcription (see, e.g., Wang, et al., Proc. Natl. Acad. Sci. USA 86:9717, 1989; Dulac, et al., supra; Jena, et al., supra).

[0092] The population of RNA, enriched or not in particular species or sequences, may be further amplified. Such amplification is particularly important when using RNA from a single cell or a few cells. A variety of amplification methods are suitable for use in the methods of the present invention, including, for example, PCR; ligase chain reaction (LCR) (see, e.g., Wu and Wallace, Genomics 4:560, 1989; Landegren, et al., Science 241:1077, 1988); self-sustained sequence replication (SSR) (see, e.g., Guatelli, et al., Proc. Natl. Acad. Sci. USA 87:1874, 1990); nucleic acid based sequence amplification (NASBA) and transcription amplification (see, e.g., Kwoh, et al., Proc. Natl. Acad. Sci. USA 86:1173, 1989). Methods for PCR technology are well known in the art (see, e.g., PCR Technology: Principles and Applications for DNA Amplification (ed. H. A. Erlich, Freeman Press, N.Y., N.Y., 1992); PCR Protocols: A Guide to Methods and Applications (eds. Innis, et al., Academic Press, San Diego, Calif., 1990); Mattila, et al., Nucleic Acids Res. 19:4967, 1991; Eckert, et al., PCR Methods and Applications 1:17, 1991; PCR (eds. McPherson, et al., IRL Press, Oxford); and U.S. Pat. No. 4,683,202). Methods of amplification are described, for example, by Ohyama, et al., (BioTechniques 29:530, 2000); Luo, et al., (Nat. Med. 5:117, 1999); Hegde, et al., (BioTechniques 29:548, 2000); Kacharmina, et al., (Meth. Enzymol. 303:3, 1999); Livesey, et al., Curr. Biol. 10:301, 2000); Spirin, et al., (Invest. Ophtalmol. Vis. Sci. 40:3108, 1999); and Sakai, et al., (Anal. Biochem. 287:32, 2000). RNA amplification and cDNA synthesis may also be conducted in cells in situ (see, e.g., Eberwine, et al. Proc. Natl. Acad. Sci. USA 89:3010, 1992).

[0093] The target molecules may be labeled to permit detection of hybridization of the target molecules to a microarray. That is, the probe may comprise a member of a signal producing system and thus, is detectable, either directly or through combined action with one or more additional members of a signal producing system. Examples of directly detectable labels include isotopic and fluorescent moieties incorporated, usually by a covalent bond, into a moiety of the probe, such as a nucleotide monomeric unit (e.g., dNMP of the primer), or a photoactive or chemically active derivative of a detectable label which can be bound to a functional moiety of the probe molecule.

[0094] Nucleic acids may be labeled during or after enrichment and/or amplification of RNAs. For example, reverse transcription may be carried out in the presence of a dNTP conjugated to a . detectable label, for example, a fluorescently labeled dNTP. In another embodiment, the cDNA or RNA probe may be synthesized in the absence of detectable label and may be labeled subsequently, for example, by incorporating biotinylated dNTPs or rNTP, or some similar means (e.g., photo-cross-linking a psoralen derivative of biotin to RNAs), followed by addition of labeled streptavidin (e.g., phycoerythrin-conjugated streptavidin) or the equivalent.

[0095] Fluorescent moieties or labels of interest include coumarin and its derivatives (e.g., 7-amino4-methylcoumarin, aminocoumarin); bodipy dyes such as Bodipy FL and cascade blue; fluorescein and its derivatives (e.g., fluorescein isothiocyanate, Oregon green); rhodamine dyes (e.g., Texas red, tetramethylrhodamine); eosins and erythrosins; cyanine dyes (e.g., Cy2, Cy3, Cy3.5, Cy5, Cy5.5, Cy7); FluorX, macrocyclic chelates of lanthanide ions (e.g., quantum dye^{™}); fluorescent energy transfer dyes such as thiazole orange-ethidium heterodimer, TOTAB, dansyl, etc. Individual fluorescent compounds which have functionalities for linking to an element desirably detected in an apparatus or assay of the invention, or which may be modified to incorporate such functionalities may also be utilized (see, e.g., Kricka, 1992, Nonisotopic DNA Probe Techniques, Academic Press San Diego, Calif.).

[0096] Chemiluminescent labels include luciferin and 2,3-dihydrophthalazinediones, for example, luminol.

[0097] Labels may also be members of a signal producing system that act in concert with one or more additional members of the same system to provide a detectable signal. Illustrative of such labels are members of a specific binding pair, such as ligands, for example, biotin, fluorescein, digoxigenin, antigen, polyvalent cations, chelator groups and the like. Members may specifically bind to additional members of the signal producing system, and the additional members may provide a detectable signal either directly or indirectly, for example, an antibody conjugated to a fluorescent moiety or an enzymatic moiety capable of converting a substrate to a chromogenic product (e.g., alkaline phosphatase conjugate antibody and the like).

[0098] Additional labels of interest include those that provide a signal only when the probe with which it is associated is specifically bound to a target molecule. Such labels include “molecular beacons” as described in Tyagi and Kramer (Nature Biotech. 14:303, 1996) and EP 0 070 685 B1. Other labels of interest include those described in U.S. Pat. No. 5,563,037; WO 97/17471; and WO 97/17076.

[0099] In other embodiments, the target nucleic acid may not be labeled. In this case, hybridization may be determined, for example, by plasmon resonance (see, e.g., Thiel, et al., Anal. Chem. 69:4948, 1997).

[0100] In one embodiment, a plurality (e.g., 2, 3, 4, 5, or more) of sets of target nucleic acids are labeled and used in one hybridization reaction (“multiplex” analysis). For example, one set of nucleic acids may correspond to RNA from one cell and another set of nucleic acids may correspond to RNA from another cell. The plurality of sets of nucleic acids may be labeled with different labels, for example, different fluorescent labels (e.g., fluorescein and rhodamine) which have distinct emission spectra so that they can be distinguished. The sets may then be mixed and hybridized simultaneously to one microarray (see, e.g., Shena, et al., Science 270:467-470, 1995).

[0101] Examples of distinguishable labels for use when hybridizing a plurality of target nucleic acids to one array are well known in the art and include: two or more different emission wavelength fluorescent dyes such as Cy3 and Cy5; combination of fluorescent proteins and dyes such as phicoerythrin and Cy5; two or more isotopes with different energy of emission such as ³²P and ³³P; gold or silver particles with different scattering spectra; labels which generate signals under different treatment conditions such as temperature, pH, treatment with additional chemical agents, etc.; or generate signals at different time points after treatment. Using one or more enzymes for signal generation allows for the use of an even greater variety of distinguishable labels, based on different substrate specificity of enzymes (e.g., alkaline phosphatase/peroxidase).

[0102] The quality of labeled nucleic acids may be evaluated prior to hybridization to an array. In one embodiment, the GeneChip® Test3 Array from Affymetrix (Santa Clara, Calif.) may be used for that purpose. This array contains probes representing a subset of characterized genes from several organisms including mammals. Thus, the quality of a labeled nucleic acid sample can be determined by hybridization of a fraction of the sample to an array.

[0103] Microarrays for use according to the invention include one or more probes of genes characteristic of human breast tumor tissue. In one embodiment, the microarray comprises one or more probes corresponding to one or more of genes selected from the group consisting of genes which are up-regulated in cancer and genes which are down-regulated in cancer. The microarray may comprise probes corresponding to, for example, at least 10, at least 20, at least 50, at least 100, or at least 1000 genes characteristic of human breast tumor tissue. The microarray may comprise probes corresponding to each gene listed in the Tables.

[0104] There may be one or more than one probe corresponding to each gene on a microarray. For example, a microarray may contain from 2 to 20 probes corresponding to one gene or about 5 to 10. The probes may correspond to the full-length RNA sequence or complement thereof of genes characteristic of human breast tumor tissue, or the probe may correspond to a portion thereof, which portion is of sufficient length to permit specific hybridization. Such probes may comprise from about 50 nucleotides to about 100, 200, 500, or 1000 nucleotides or more than 1000 nucleotides. As further described herein, microarrays may contain oligonucleotide probes, consisting of about 10 to 50 nucleotides, about 15 to 30 nucleotides, or about 20-25 nucleotides. The probes may be single-stranded and will have sufficient complementarity to its target to provide for the desired level of sequence specific hybridization.

[0105] Typically, the arrays used in the present invention will have a site density of greater than 100 different probes per cm². The arrays may have a site density of, for example, greater than 500/cm², greater than about 1000/cm², or greater than about 10,000/cm². The arrays may have, for example, more than about 100 different probes on a single substrate, more than about 1000 different probes, more than about 10,000 different probes, or more than about 100,000 different probes on a single substrate.

[0106] A number of different microarray configurations and methods for their production are known to those of skill in the art and are disclosed in U.S. Pat. Nos: 5,242,974; 5,384,261; 5,405,783; 5,412,087; 5,424,186; 5,429,807; 5,436,327; 5,445,934; 5,556,752; 5,405,783; 5,412,087; 5,424,186; 5,429,807; 5,436,327; 5,472,672; 5,527,681; 5,529,756; 5,545,531; 5,554,501; 5,561,071; 5,571,639; 5,593,839; 5,624,711; 5,700,637; 5,744,305; 5,770,456; 5,770,722; 5,837,832; 5,856,101; 5,874,219; 5,885,837; 5,919,523; 6,022,963; 6,077,674; and 6,156,501; Shena, et al., Tibtech 16:301, 1998; Duggan, et al., Nat. Genet. 21:10, 1999; Bowtell, et al., Nat. Genet. 21:25, 1999; Lipshutz, et al., 21 Nature Genet. 20-24, 1999; Blanchard, et al., 11 Biosensors and Bioelectronics, 687-90, 1996; Maskos, et al., 21 Nucleic Acids Res. 4663-69, 1993; Hughes, et al., Nat. Biotechol. 19:342, 2001; the disclosures of which are herein incorporated by reference. Patents describing methods of using arrays in various applications include: U.S. Pat. Nos. 5,143,854; 5,288,644; 5,324,633; 5,432,049; 5,470,710; 5,492,806; 5,503,980; 5,510,270; 5,525,464; 5,547,839; 5,580,732; 5,661,028; 5,848,659; and 5,874,219; the disclosures of which are herein incorporated by reference.

[0107] Arrays may include control and reference nucleic acids. Control nucleic acids include, for example, prokaryotic genes such as bioB, bioC and bioD, cre from P1 bacteriophage or polyA controls, such as dap, lys, phe, thr, and trp. Reference nucleic acids allow the normalization of results from one experiment to another and the comparison of multiple experiments on a quantitative level. Exemplary reference nucleic acids include housekeeping genes of known expression levels, for example, GAPDH, hexokinase, and actin.

[0108] In one embodiment, an array of oligonucleotides may be synthesized on a solid support. Exemplary solid supports include paper, membranes, filters, pins, glass, plastics, polymers, metals, metalloids, ceramics, organics, etc. Using chip masking technologies and photoprotective chemistry, it is possible to generate ordered arrays of nucleic acid probes. These arrays, which are known, for example, as “DNA chips” or very large scale immobilized polymer arrays (“VLSIPS^{™}” arrays), may include millions of defined probe regions on a substrate having an area of about 1 cm² to several cm², thereby incorporating from a few to millions of probes (see, e.g., U.S. Pat. No. 5,631,734).

[0109] A nucleic acid probe may be at least, for example, about 10, 15, 20, 25, 30, 50, 100 or more nucleotides, and may comprise the full-length gene. For example, probes may be those that hybridize specifically to the genes listed in the Tables.

[0110] Nucleic acid probes may be obtained, for example, by PCR amplificartion of gene segments from genomic, cDNA (e.g., RT-PCR), or cloned sequences. cDNA probes may be prepared according to methods known in the art and further described herein, for example, by reverse-transcription PCR (RT-PCR) of RNA using sequence specific primers. Sequences of genes or cDNA from which probes are generated may be obtained, for example, from GenBank, other public databases, or publications.

[0111] Oligonucleotide probes may also be synthesized by standard methods known in the art, for example, by automated DNA synthesizer or any other chemical method. As an example, phosphorothioate oligonucleotides may be synthesized by the method of Stein, et al., (Nucl. Acids Res. 16:3209, 1988), and methylphosphonate oligonucleotides may be prepared by controlled pore glass polymer supports (see, e.g., Sarin, et al., Proc. Natl. Acad. Sci. U.S.A. 85:7448-7451, 1988). In another embodiment, the oligonucleotide may be a 2′-)-methylribonucleotide (Inoue, et al., Nucl. Acids Res. 15:6131-6148, 1987), or a chimeric RNA-DNA analog (Inoue, et al., FEBS Lett. 215:327-330, 1987).

[0112] Nucleic acid probes may be natural nucleic acids or chemically modified nucleic acids (e.g., composed of nucleotide analogs); however, the probes should possess activated hydroxyl groups compatible with the linking chemistry. The protective groups may be photolabile, or the protective groups may be labile under certain chemical conditions (e.g., acid). The surface of the solid support may contain a composition that generates acids upon exposure to light. Thus, exposure of a region of the substrate to light generates acids in that region that remove the protective groups in the exposed region. Also, the synthesis method may use 3′- protected 5′-0-phosphoramidite-activated deoxynucleoside. In this case, the oligonucleotide is synthesized in the 5′ to 3′ direction, which results in a free 5′ end.

[0113] In one embodiment of the present invention, oligonucleotides of an array may be synthesized using a 96-well automated multiplex oligonucleotide synthesizer (A.M.O.S.) that is capable of producing thousands of oligonucleotides (see, e.g., Lashkari, et al., Proc. Natl. Acad. Sci. USA 93: 7912, 1995).

[0114] To compare expression levels, labeled nucleic acids may be contacted with the array under conditions sufficient for binding between the target nucleic acid and the probe on the array. In one embodiment, the hybridization conditions may be selected to provide for the desired level of hybridization specificity; that is, conditions sufficient for hybridization to occur between the labeled nucleic acids and probes on the microarray.

[0115] Hybridization may be carried out in conditions permitting essentially specific hybridization. The length and GC content of the nucleic acid will determine the thermal melting point and thus, the hybridization conditions necessary for obtaining specific hybridization of the probe to the target nucleic acid. These factors are well known to a person of skill in the art, and may also be tested in assays. An extensive guide to nucleic acid hybridization may be found in Tijssen, et al. (Laboratory Techniques in Biochemistry and Molecular Biology, Vol. 24: Hybridization With Nucleic Acid Probes, P. Tijssen, ed. Elsevier, N.Y., (1993)). Generally, stringent conditions may be selected to be about 5° C. lower than the thermal melting point (Tm) for the specific sequence at a defined ionic strength and pH. The Tm is the temperature (under defined ionic strength and pH) at which 50% of the target sequence hybridizes to a perfectly matched probe. Highly stringent conditions may be selected to be equal to the Tm point for a particular probe. Sometimes the term “dissociation temperature” (Td) is used to define the temperature at which at least half of the probe dissociates from a perfectly matched target nucleic acid. In any case, a variety of techniques for estimating the Tm or Td are available, and generally are described in Tijssen, supra. Typically, G-C base pairs in a duplex are estimated to contribute about 3° C. to the Tm, while A-T base pairs are estimated to contribute about 2° C., up to a theoretical maximum of about 80-100° C. However, more sophisticated models of Tm and Td are available in which G-C stacking interactions, solvent effects, the desired assay temperature, and the like are taken into account.

[0116] In one embodiment, non-specific binding or background signal may be reduced by the use of a detergent (e.g, C-TAB) or a blocking reagent (e.g., sperm DNA, cot-1 DNA, etc.) during the hybridization. In another embodiment, the hybridization may be performed in the presence of about 0.5 mg/ml DNA (e.g., herring sperm DNA). The use of blocking agents in hybridization is well known to those of skill in the art (see, e.g., Tijssen, supra).

[0117] If the target sequences are detected using the same label, different arrays may be employed for each physiological source or the same array may be screened multiple times. The above methods may be varied to provide for multiplex analysis by employing different and distinguishable labels for the different target populations (e.g., different physiological sources). According to this multiplex method, the same array may be used at the same time for each of the different target populations.

[0118] The methods described above result in the production of hybridization patterns of labeled target nucleic acids on the array surface. The resultant hybridization patterns of labeled nucleic acids may be visualized or detected in a variety of ways, with the particular manner of detection selected based on the particular label of the target nucleic acid. Representative detection means include scintillation counting, autoradiography, fluorescence measurement, calorimetric measurement, light emission measurement, light scattering, and the like.

[0119] One such method of detection utilizes an array scanner that is commercially available (Affymetrix, Santa Clara, Calif.), for example, the 417^{™} Arrayer, the 418^{™} Array Scanner, or the Agilent GeneArray^{™} Scanner. This scanner is controlled from a system computer with an interface and easy-to-use software tools. The output may be directly imported into or directly read by a variety of software applications. Scanning devices are described in, for example, U.S. Pat. Nos. 5,143,854 and 5,424,186.

[0120] For fluorescent labeled probes, the fluorescence emissions at each site of a transcript array may be, for example, detected by scanning confocal laser microscopy. Alternatively, a laser may be used that allows simultaneous specimen illumination at wavelengths specific to the two fluorophores and emissions from the two fluorophores may be analyzed simultaneously (see, e.g., Shalon, et al., Genome Res. 6:639-645, 1996). In one embodiment, the arrays may be scanned with a laser fluorescent scanner with a computer controlled X-Y stage and a microscope objective. Fluorescence laser scanning devices are described in Shalon, et al., supra.

[0121] Following the data gathering operation, the data will typically be reported to a data analysis operation. To facilitate the sample analysis operation, the data obtained by the reader from the device may be analyzed using a digital computer. Typically, the computer will be appropriately programmed for receipt and storage of the data from the device, as well as for analysis and reporting of the data gathered, for example, subtraction of the background, deconvolution of multi-color images, flagging or removing artifacts, verifying that controls have performed properly, normalizing the signals, interpreting fluorescence data to determine the amount of hybridized target, normalization of background and single base mismatch hybridizations, and the like.

[0122] In one embodiment, a system comprises a search function that allows one to search for specific patterns, for example, patterns relating to differential gene expression, for example, between the expression profile of a cancer cell and the expression profile of a counterpart normal cell in a subject. A system may also allow one to search for patterns of gene expression between more than two samples.

[0123] Various algorithms are available for analyzing gene expression profile data, for example, the type of comparisons to perform. In certain embodiments, it is desirable to group genes that are co-regulated. This allows for the comparison of large numbers of profiles. One embodiment for identifying such groups of genes involves clustering algorithms (for reviews of clustering algorithms, see, e.g., Fukunaga, 1990, Statistical Pattern Recognition, 2nd Ed., Academic Press, San Diego; Everitt, 1974, Cluster Analysis, London: Heinemann Educ. Books; Hartigan, 1975, Clustering Algorithms, New York: Wiley; Sneath and Sokal, 1973, Numerical Taxonomy, Freeman; Anderberg, 1973, Cluster Analysis for Applications, Academic Press: New York).

[0124] Clustering may be based on other characteristics of the genes, for example, their level of expression (see, e.g., U.S. Pat. No. 6,203,987), or permit clustering of time curves (see, e.g. U.S. Pat. No. 6,263,287). Examples of clustering algorithms include K-means clustering and hierarchical clustering. Clustering may also be achieved by visual inspection of gene expression data using a graphical representation of the data (e.g. a “heat map”). An example of software which contains clustering algorithms and a means to graphically represent gene expression data is Spotfire DecisionSite (Spotfire, Inc., Somerville, Mass. and Göteborg, Sweden).

[0125] Comparison of the expression levels of one or more genes characteristic of human breast tumor tissue with reference expression levels, for example, expression levels in diseased cells of cancer or in normal counterpart cells, may be conducted using computer systems. In one embodiment, expression levels may be obtained from two cells and these two sets of expression levels may be introduced into a computer system for comparison. In another embodiment, one set of expression levels is entered into a computer system for comparison with values that are already present in the computer system, or in computer-readable form that is then entered into the computer system.

[0126] In one embodiment, the computer system may also contain a database comprising values representing levels of expression of one or more genes characteristic of human breast tumor tissue. The database may contain one or more expression profiles of genes characteristic of human breast tumor tissue in different cells.

[0127] In another embodiment, the invention provides a computer-readable form of the gene expression profile data, or of values corresponding to the level of expression of at least one gene characteristic of cancer in a diseased cell. The values may be MRNA expression levels obtained from experiments, for example, microarray analysis. The values may also be mRNA levels normalized relative to a reference gene whose expression is constant in numerous cells under numerous conditions (e.g., GAPDH). In other embodiments, the values in the computer may be ratios of, or differences between, normalized or non-normalized mRNA levels in different samples.

[0128] In one embodiment, the expression data of a cell of a subject treated in vitro or in vivo with the drug is entered into a computer and the computer is instructed to compare the data entered to the data in the computer, and to provide results indicating whether the expression data input into the computer are more similar to those of a cell of a subject that is responsive to the drug or more similar to those of a cell of a subject that is not responsive to the drug. Thus, the results indicate whether the subject is likely to respond to the treatment with the drug or unlikely to respond to it.

[0129] The invention also provides a machine-readable or computer-readable medium including program instructions for performing the following steps: (i) comparing a plurality of values corresponding to expression levels of one or more genes characteristic of human breast tumor tissue in a query cell with a database including records comprising reference expression or expression profile data of one or more reference cells and an annotation of the type of cell; and (ii) indicating to which cell the query cell is most similar based on similarities of expression profiles. The reference cells may be cells from subjects at different stages of cancer. The reference cells may also be cells from subjects responding or not responding to a particular drug treatment and optionally incubated in vitro or in vivo with the drug.

[0130] The reference cells may also be cells from subjects responding or not responding to several different treatments, and the computer system indicates a preferred treatment for the subject. Accordingly, the invention provides a method for selecting a therapy for a patient having cancer, the method comprising: (i) providing the level of expression of one or more genes characteristic of human breast tumor tissue in a diseased cell of the patient; (ii) providing a plurality of reference profiles, each associated with a therapy, wherein the subject expression profile and each reference profile has a plurality of values, each value representing the level of expression of a gene characteristic of cancer; and (iii) selecting the reference profile most similar to the subject expression profile, to thereby select a therapy for said patient. In one embodiment, step (iii) is performed by a computer. The most similar reference profile may be selected by weighing a comparison value of the plurality using a weight value associated with the corresponding expression data.

[0131] The relative abundance of an mRNA in two biological samples may be scored as a perturbation and its magnitude determined (i.e., the abundance is different in the two sources of mRNA tested), or as not perturbed (i.e., the relative abundance is the same). In various embodiments, a difference between the two sources of RNA of at least a factor of about 25% (RNA from one source is 25% more abundant in one source than the other source), more usually about 50%, even more often by a factor of about 2 (twice as abundant), 3 (three times as abundant) or 5 (five times as abundant) is scored as a perturbation. Perturbations may be used by a computer for calculating and expression comparisons.

### Drug Design Using Microarrays

[0132] The invention also provides methods for designing and optimizing drugs for cancer. In one embodiment, compounds may be screened by comparing the expression level of one or more genes characteristic of human breast tumor tissue following incubation of a diseased cell of cancer or similar cell with the test compound. In another embodiment, the expression level of the genes may be determined using microarrays, and comparing the gene expression profile of a cell in response to the test compound with the gene expression profile of a normal cell corresponding to a diseased cell of cancer (a “reference profile”). In a further embodiment, the expression profile may also be compared to that of a diseased cell of cancer. The comparisons may be done by introducing the gene expression profile data of the cell treated with drug into a computer system comprising reference gene expression profiles, which are stored in a computer readable form, using appropriate algorithms. Test compounds may be screened for those that alter the level of expression of genes characteristic of human breast tumor tissue. Such compounds, that is, compounds which are capable of normalizing the expression of essentially all genes characteristic of human breast tumor tissue, are candidate therapeutics.

[0133] The efficacy of the compounds may then be tested in additional in vitro and in vivo assays, and in animal models (e.g., xenograft model). The test compound may be administered to the test animal, and one or more symptoms of the disease may be monitored for improvement of the condition of the animal. Expression of one or more genes characteristic of human breast tumor tissue may also be measured before and after administration of the test compound to the animal. A normalization of the expression of one or more of these genes is indicative of the efficiency of the compound for treating cancer in the animal.

[0134] In the clinical setting, obtaining human-derived samples of tissue exhibiting cancer may be difficult, if not prohibitive. Therefore, identification of gene expression changes indicative of efficacy of a therapeutic compound may be determined in a more easily accessible, surrogate cell population, for example, peripheral blood leukocytes (PBLs). This method may be performed either in a human or animal model system. In one embodiment, a test compound may be administered to the test animal (either normal or cancer-containing) at the same doses that have been observed to be efficacious in treating cancer in that animal model. Blood may be drawn from the animal at various time points (e.g., 1, 4, 7, and 24 hours following the first, mid-point, and last day of a regimen of multiple day dosing). Animals dosed with vehicle may be used as controls. RNA may be isolated from PBLs, and can be used to generate probes for hybridization to microarrays. The hybridization results may then be analyzed using computer programs and databases, as described above. The resulting expression profile may be compared directly to the analogous profile from the treated cancer tissue for similarities or simply correlated with efficacy (e.g., in terms of doses and time points) in the animal model.

[0135] In another embodiment, human blood may be treated ex vivo with a therapeutic compound at a dose consistent with the therapeutic dose in the animal model, or at a dose that is consistent with known plasma levels of the therapeutic dose in the animal model. The blood may be treated (e.g., rocking at 37° C.) with the therapeutic compound immediately, or after some period of incubation time (e.g., 24 hours) to allow for gene expression to re-equilibrate after the blood draw. The blood may also be treated with the therapeutic compound for various timepoints (e.g., 4 and 24 hours), and then PBL RNA isolated and used to create a probe for hybridization to a microarray. A compound solubilization agent (e.g., DMSO) may be used as a control. The resulting expression profile may be compared directly to the analogous profile from the treated cancer tissue for similarities or simply correlated with efficacy (e.g., in terms of doses and time points) in the animal model.

[0136] The toxicity of the candidate therapeutic compound may be evaluated, for example, by determining whether the compound induces the expression of genes known to be associated with a toxic response. Expression of such toxicity related genes may be determined in different cell types, for example, those that are known to express the genes. In fact, alterations in gene expression may serve as a more sensitive marker of human toxicity than routine preclinical safety studies. In one method, microarrays may be used for detecting changes in the expression of genes known to be associated with a toxic response. It may be possible to perform proof of concept studies demonstrating that changes in gene expression levels may predict toxic events that were not identified by routine preclinical safety testing (see, e.g., Huang, et al., Toxicol. Sci. 63:196-207, 2001; Waring, et al., Toxicol. Appl. Pharamacol. 175:28-42, 2001).

[0137] Drug screening may be performed by adding a test compound to a sample of cells, and monitoring the effect. A parallel sample which does not receive the test compound may also be monitored as a control. The treated and untreated cells are then compared by any suitable phenotypic criteria, including but not limited to microscopic analysis, viability testing, ability to replicate, histological examination, the level of a particular RNA or polypeptide associated with the cells, the level of enzymatic activity expressed by the cells or cell lysates, and the ability of the cells to interact with other cells or compounds. Differences between treated and untreated cells indicates effects attributable to the test compound.

[0138] Desirable effects of a test compound include an effect on any phenotype that was conferred by the cancer-associated marker nucleic acid sequence. Examples include a test compound that limits the overabundance of mRNA, limits production of the encoded protein, or limits the functional effect of the protein. The effect of the test compound would be apparent when comparing results between treated and untreated cells.

### Diagnostic and Prognostic Assays

[0139] The present invention provides nucleic acid sequences which are differentially regulated in cancer, and a method for identifying such sequences. The present invention provides a method for identifying a nucleotide sequence which is differentially regulated in a subject with cancer, comprising: hybridizing a nucleic acid sample corresponding to RNA obtained from the subject to a nucleic acid sample comprising one or more nucleic acid molecules of known identity; and measuring the hybridization of the nucleic acid sample to the one or more nucleic acid molecules of known identity, wherein a difference in the hybridization of the nucleic acid sample to the one or more nucleic acid molecules of known identity relative to a nucleic acid sample obtained from a subject without cancer is indicative of the differential expression of the nucleotide sequence in a subject with cancer.

[0140] Generally, the present invention provides a method for identifying nucleic acid sequences which are differentially regulated in a subject with cancer comprising isolating messenger RNA from a subject, generating cRNA from the mRNA sample, hybridizing the cRNA to a microarray comprising a plurality of nucleic acid molecules stably associated with discrete locations on the array, and identifying patterns of hybridization of the cRNA to the array. According to the present invention, a nucleic acid molecule which hybridizes to a given location on the array is said to be differentially regulated if the hybridization signal is, for example, at least two-fold higher or lower than the hybridization signal at the same location on an identical array hybridized with a nucleic acid sample obtained from a subject that does not have cancer.

[0141] Expression patterns may be used to derive a panel of biomarkers that can be used to predict the efficacy of drug treatment in the patients. The biomarkers may consist of gene expression levels from microarray experiments on RNA isolated from biological samples, RNA isolated from frozen samples of tumor biopsies, or mass spectrometry-derived protein masses in the serum.

[0142] Although the precise mechanism for data analysis will depend upon the exact nature of the data, a typical procedure for developing a panel of biomarkers is as follows. The data (gene expression levels or mass spectra) are collected for each patient prior to treatment. As the study progresses, the patients are classified according to their response to the drug treatment; either as efficacious or non-efficacious. Multiple levels of efficacy can be accommodated in a data model, but a binary comparison is considered optimal, particularly if the patient population is less than several hundred. Assuming adequate numbers of patients in each class, the protein and/or gene expression data may be analyzed by a number of techniques known in the art. Many of the techniques are derived from traditional statistics as well from the field of machine learning. These techniques serve two purposes:

[0143] 1. Reduce the dimensionality of data-In the case of mass spectra or gene expression microarrays, data is reduced from many thousands of individual data points to bout three to ten. The reduction is based upon the predictive power of the data points when taken as a set.

[0144] 2. Training-These three to ten data points are then used to train multiple machine learning algorithms which then “learn” to recognize, in this case, patterns of protein masses or gene expression which distinguish efficacious drug treatment from non-efficacious. All patient samples can be used to train the algorithms.

[0145] The resulting trained algorithms are then tested in order to measure their predictive power. Typically, when less than many hundreds of training examples are available, some form of cross-validation is performed. To illustrate, consider a ten-fold cross validation. In this case, patient samples are randomly assigned to one of ten bins. In the first round of validation the samples in nine of the bins are used for training and the remaining samples in the tenth bin are used to test the algorithm. This is repeated an additional nine times, each time leaving out the samples in a different bin for testing. The results (correct predictions and errors) from all ten rounds are combined and the predictive power is then assessed. Different algorithms, as well as different panels, may be compared in this way for this study. The “best” algorithm/panel combination will then be selected. This “smart” algorithm may then be used in future studies to select the patients that are most likely to respond to treatment.

[0146] Many algorithms benefit from additional information taken for the patients. For example, gender or age could be used to improve predictive power. Also, data transformations such as normalization and smoothing may be used to reduce noise. Because of this, a large number of algorithms may be trained using many different parameters in order to optimize the outcome. If predictive patterns exist in the data, it is likely that an optimal, or near-optimal, “smart” algorithm can be developed. If more patient samples become available, the algorithm can be retrained to take advantage of the new data.

[0147] As an example using mass spectrometry, plasma may be applied to a hydrophobic SELDI-target, washed extensively in water, and analyzed by the SELDI-Tof mass spectrometer. This may be repeated on 100 or more patient samples. The protein profiles resulting from the intensities of some 16,000 m/z values in each sample would be statistically analyzed in order to identify sets of specific m/z values that are predictive of drug efficacy. Identical experiments using other SELDI-targets, such as ion-exchange or IMAC surfaces, could also be conducted. These will capture different subsets of the proteins present in plasma. Furthermore, the plasma may be denatured and prefractionated prior to application onto the SELDI target.

[0148] The present invention provides methods for determining whether a subject is at risk for developing a disease or condition characterized by unwanted cell proliferation by detecting biomarkers, that is, nucleic acids and/or polypeptide markers for cancer.

[0149] In clinical applications, human tissue samples may be screened for the presence and/or absence of biomarkers identified herein. Such samples could consist of needle biopsy cores, surgical resection samples, lymph node tissue, or serum. For example, these methods include obtaining a biopsy, which is optionally fractionated by cryostat sectioning to enrich tumor cells to about 80% of the total cell population. In certain embodiments, nucleic acids extracted from these samples may be amplified using techniques well known in the art. The levels of selected markers detected would be compared with statistically valid groups of metastatic, non-metastatic malignant, benign, or normal tissue samples.

[0150] In one embodiment, the diagnostic method comprises determining whether a subject has an abnormal MRNA and/or protein level of the biomarkers, such as by Northern blot analysis, reverse transcription-polymerase chain reaction (RT-PCR), in situ hybridization, immunoprecipitation, Western blot hybridization, or immunohistochemistry. According to the method, cells may be obtained from a subject and the levels of the biomarkers, protein, or mRNA level, are determined and compared to the level of these markers in a healthy subject. An abnormal level of the biomarker polypeptide or MRNA levels is likely to be indicative of cancer.

[0151] In one embodiment, the method comprises using a nucleic acid probe to determine the presence of cancerous cells in a tissue from a patient. Specifically, the method comprises:

[0152] 1. providing a nucleic acid probe comprising a nucleotide sequence, for example, at least 10, 15, 25 or 40 nucleotides, and up to all or nearly all of the coding sequence which is complementary to a portion of the coding sequence of a nucleic acid sequence and is differentially expressed in tumors cells;

[0153] 2. obtaining a tissue sample from a patient potentially comprising cancerous cells;

[0154] 3. providing a second tissue sample containing cells substantially all of which are non-cancerous;

[0155] 4. contacting the nucleic acid probe under stringent conditions with RNA of each of said first and second tissue samples (e.g., in a Northern blot or in situ hybridization assay); and

[0156] 5. comparing (a) the amount of hybridization of the probe with RNA of the first tissue sample, with (b) the amount of hybridization of the probe with RNA of the second tissue sample; wherein a statistically significant difference in the amount of hybridization with the RNA of the first tissue sample as compared to the amount of hybridization with the RNA of the second tissue sample is indicative of the presence of cancerous cells in the first tissue sample.

[0157] In one aspect, the method comprises in situ hybridization with a probe derived from a given marker nucleic acid sequence. The method comprises contacting the labeled hybridization probe with a sample of a given type of tissue potentially containing cancerous or pre-cancerous cells as well as normal cells, and determining whether the probe labels some cells of the given tissue type to a degree significantly different (e.g., by at least a factor of two, or at least a factor of five, or at least a factor of twenty, or at least a factor of fifty) than the degree to which it labels other cells of the same tissue type.

[0158] Also within the invention is a method of determining the phenotype of a test cell from a given human tissue, for example, whether the cell is (a) normal, or (b) cancerous or precancerous, by contacting the mRNA of a test cell with a nucleic acid probe, for example, at least about 10, 15, 25, or 40 nucleotides, and up to all or nearly all of a sequence which is complementary to a portion of the coding sequence of a nucleic acid sequence, and which is differentially expressed in tumor cells as compared to normal cells of the given tissue type; and determining the approximate amount of hybridization of the probe to the mRNA, an amount of hybridization either more or less than that seen with the mRNA of a normal cell of that tissue type being indicative that the test cell is cancerous or pre-cancerous.

[0159] Alternatively, the above diagnostic assays may be carried out using antibodies to detect the protein product encoded by the marker nucleic acid sequence. Accordingly, in one embodiment, the assay would include contacting the proteins of the test cell with an antibody specific for the gene product of a nucleic acid, the marker nucleic acid being one which is expressed at a given control level in normal cells of the same tissue type as the test cell, and determining the approximate amount of immunocomplex formation by the antibody and the proteins of the test cell, wherein a statistically significant difference in the amount of the immunocomplex formed with the proteins of a test cell as compared to a normal cell of the same tissue type is an indication that the test cell is cancerous or pre-cancerous.

[0160] The method for producing polyclonal and/or monoclonal antibodies which specifically bind to polypeptides useful in the present invention is known to those of skill in the art and may be found in, for example, Dymecki, et al., (J. Biol. Chem. 267:4815, 1992); Boersma & Van Leeuwen, (J. Neurosci. Methods 51:317, 1994); Green, et al., (Cell 28:477, 1982); and Armheiter, et al., (Nature 294:278, 1981).

[0161] Another such method includes the steps of: providing an antibody specific for the gene product of a marker nucleic acid sequence, the gene product being present in cancerous tissue of a given tissue type at a level more or less than the level of the gene product in non-cancerous tissue of the same tissue type; obtaining from a patient a first sample of tissue of the given tissue type, which sample potentially includes cancerous cells; providing a second sample of tissue of the same tissue type (which may be from the same patient or from a normal control, e.g. another individual or cultured cells), this second sample containing normal cells and essentially no cancerous cells; contacting the antibody with protein (which may be partially purified, in lysed but unfractionated cells, or in situ) of the first and second samples under conditions permitting immunocomplex formation between the antibody and the marker nucleic acid sequence product present in the samples; and comparing (a) the amount of immunocomplex formation in the first sample, with (b) the amount of immunocomplex formation in the second sample, wherein a statistically significant difference in the amount of immunocomplex formation in the first sample less as compared to the amount of immunocomplex formation in the second sample is indicative of the presence of cancerous cells in the first sample of tissue.

[0162] The subject invention further provides a method of determining whether a cell sample obtained from a subject possesses an abnormal amount of marker polypeptide which comprises (a) obtaining a cell sample from the subject, (b) quantitatively determining the amount of the marker polypeptide in the sample so obtained, and (c) comparing the amount of the marker polypeptide so determined with a known standard, so as to thereby determine whether the cell sample obtained from the subject possesses an abnormal amount of the marker polypeptide. Such marker polypeptides may be detected by immunohistochemical assays, dot-blot assays, ELISA, and the like.

[0163] Immunoassays are commonly used to quantitate the levels of proteins in cell samples, and many other immunoassay techniques are known in the art. The invention is not limited to a particular assay procedure, and therefore, is intended to include both homogeneous and heterogeneous procedures. Exemplary immunoassays which may be conducted according to the invention include fluorescence polarization immunoassay (FPIA), fluorescence immunoassay (FIA), enzyme immunoassay (EIA), nephelometric inhibition immunoassay (NIA), enzyme-linked immunosorbent assay (ELISA), and radioimmunoassay (RIA). An indicator moiety, or label group, may be attached to the subject antibodies and is selected so as to meet the needs of various uses of the method which are often dictated by the availability of assay equipment and compatible immunoassay procedures. General techniques to be used in performing the various immunoassays noted above are known to those of ordinary skill in the art.

[0164] In another embodiment, the level of the encoded product, or alternatively the level of the polypeptide, in a biological fluid (e.g., blood or urine) of a patient may be determined as a way of monitoring the level of expression of the marker nucleic acid sequence in cells of that patient. Such a method would include the steps of obtaining a sample of a biological fluid from the patient, contacting the sample (or proteins from the sample) with an antibody specific for an encoded marker polypeptide, and determining the amount of immune complex formation by the antibody, with the amount of immune complex formation being indicative of the level of the marker encoded product in the sample. This determination is particularly instructive when compared to the amount of immune complex formation by the same antibody in a control sample taken from a normal individual or in one or more samples previously or subsequently obtained from the same person.

[0165] In another embodiment, the method may be used to determine the amount of marker polypeptide present in a cell, which in turn may be correlated with progression of a hyperproliferative disorder. The level of the marker polypeptide may be used predictively to evaluate whether a sample of cells contains cells which are, or are predisposed towards becoming, transformed cells. Moreover, the subject method may be used to assess the phenotype of cells which are known to be transformed, the phenotyping results being useful in planning a particular therapeutic regimen. For example, very high levels of the marker polypeptide in sample cells is a powerful diagnostic and prognostic marker for a cancer. The observation of marker polypeptide levels may be utilized in decisions regarding, for example, the use of more aggressive therapies.

[0166] As set out above, one aspect of the present invention relates to diagnostic assays for determining, in the context of cells isolated from a patient, if the level of a marker polypeptide is significantly reduced in the sample cells. The term “significantly reduced” refers to a cell phenotype wherein the cell possesses a reduced cellular amount of the marker polypeptide relative to a normal cell of similar tissue origin. For example, a cell may have less than about 50%, 25%, 10%, or 5% of the marker polypeptide compared to that of a normal control cell. In particular, the assay evaluates the level of marker polypeptide in the test cells, and, preferably, compares the measured level with marker polypeptide detected in at least one control cell, for example, a normal cell and/or a transformed cell of known phenotype.

[0167] Of particular importance to the subject invention is the ability to quantitate the level of marker polypeptide as determined by the number of cells associated with a normal or abnormal marker polypeptide level. The number of cells with a particular marker polypeptide phenotype may then be correlated with patient prognosis. In one embodiment of the invention, the marker polypeptide phenotype of a lesion is determined as a percentage of cells in a biopsy which are found to have abnormally high/low levels of the marker polypeptide. Such expression may be detected by immunohistochemical assays, dot-blot assays, ELISA, and the like.

[0168] Where tissue samples are employed, immunohistochemical staining may be used to determine the number of cells having the marker polypeptide phenotype. For such staining, a multiblock of tissue may be taken from the biopsy or other tissue sample and subjected to proteolytic hydrolysis, employing such agents as protease K or pepsin. In certain embodiments, it may be desirable to isolate a nuclear fraction from the sample cells and detect the level of the marker polypeptide in the nuclear fraction.

[0169] The tissue samples are fixed by treatment with a reagent such as formalin, glutaraldehyde, methanol, or the like. The samples are then incubated with an antibody (e.g., a monoclonal antibody) with binding specificity for the marker polypeptides. This antibody may be conjugated to a label for subsequent detection of binding. Samples are incubated for a time sufficient for formation of the immunocomplexes. Binding of the antibody is then detected by virtue of a label conjugated to this antibody. Where the antibody is unlabeled, a second labeled antibody may be employed, for example, which is specific for the isotype of the anti-marker polypeptide antibody. Examples of labels which may be employed include radionuclides, fluorescers, chemiluminescers, enzymes, and the like.

[0170] Where enzymes are employed, the substrate for the enzyme may be added to the samples to provide a colored or fluorescent product. Examples of suitable enzymes for use in conjugates include horseradish peroxidase, alkaline phosphatase, malate dehydrogenase, and the like. Where not commercially available, such antibody-enzyme conjugates are readily produced by techniques known to those skilled in the art.

[0171] In one embodiment, the assay is performed as a dot blot assay. The dot blot assay finds particular application where tissue samples are employed as it allows determination of the average amount of the marker polypeptide associated with a single cell by correlating the amount of marker polypeptide in a cell-free extract produced from a predetermined number of cells.

[0172] It is well established in the cancer literature that tumor cells of the same type (e.g., breast and/or colon tumor cells) may not show uniformly increased expression of individual oncogenes or uniformly decreased expression of individual tumor suppressor genes. There may also be varying levels of expression of a given marker gene even between cells of a given type of cancer, further emphasizing the need for reliance on a battery of tests rather than a single test. Accordingly, in one aspect, the invention provides for a battery of tests utilizing a number of probes of the invention, in order to improve the reliability and/or accuracy of the diagnostic test.

[0173] In one embodiment, the present invention also provides a method wherein nucleic acid probes are immobilized on a DNA chip in an organized array. Oligonucleotides may be bound to a solid support by a variety of processes, including lithography. For example, a chip may hold up to 250,000 oligonucleotides. These nucleic acid probes comprise a nucleotide sequence, for example, at least about 12, 15, 25, or 40 nucleotides in length, and up to all or nearly all of a sequence which is complementary to a portion of the coding sequence of a marker nucleic acid sequence and is differentially expressed in tumor cells. The present invention provides significant advantages over the available tests for various cancers, because it increases the reliability of the test by providing an array of nucleic acid markers on a single chip.

[0174] The method includes obtaining a biopsy, which is optionally fractionated by cryostat sectioning to enrich tumor cells to about 80% of the total cell population. The DNA or RNA is then extracted, amplified, and analyzed with a DNA chip to determine the presence of absence of the marker nucleic acid sequences.

[0175] In one embodiment, the nucleic acid probes are spotted onto a substrate in a two-dimensional matrix or array. Samples of nucleic acids may be labeled and then hybridized to the probes. Double-stranded nucleic acids, comprising the labeled sample nucleic acids bound to probe nucleic acids, may be detected once the unbound portion of the sample is washed away.

[0176] The probe nucleic acids may be spotted on substrates including glass, nitrocellulose, etc. The probes can be bound to the substrate by either covalent bonds or by non-specific interactions, such as hydrophobic interactions. The sample nucleic acids can be labeled using radioactive labels, fluorophores, chromophores, etc.

[0177] In yet another embodiment, the invention contemplates using a panel of antibodies which are generated against the marker polypeptides of this invention. Such a panel of antibodies may be used as a reliable diagnostic probe for cancer. The assay of the present invention comprises contacting a biopsy sample containing cells, for example, breast cells, with a panel of antibodies to one or more of the encoded products to determine the presence or absence of the marker polypeptides.

[0178] The diagnostic methods of the subject invention may also be employed as follow-up to treatment, for example, quantitation of the level of marker polypeptides may be indicative of the effectiveness of current or previously employed cancer therapies as well as the effect of these therapies upon patient prognosis.

[0179] In addition, the marker nucleic acids or marker polypeptides may be utilized as part of a diagnostic panel for initial detection, follow-up screening, detection of reoccurrence, and post-treatment monitoring for chemotherapy or surgical treatment.

[0180] Accordingly, the present invention makes available diagnostic assays and reagents for detecting gain and/or loss of marker polypeptides from a cell in order to aid in the diagnosis and phenotyping of proliferative disorders arising from, for example, tumorigenic transformation of cells.

[0181] The diagnostic assays described above may be adapted to be used as prognostic assays, as well. Such an application takes advantage of the sensitivity of the assays of the invention to events which take place at characteristic stages in the progression of a tumor. For example, a given marker gene may be up- or down-regulated at a very early stage, perhaps before the cell is irreversibly committed to developing into a malignancy, while another marker gene may be characteristically up- or down-regulated only at a much later stage. Such a method could involve the steps of contacting the mRNA of a test cell with a nucleic acid probe derived from a given marker nucleic acid which is expressed at different characteristic levels in cancerous or precancerous cells at different stages of tumor progression, and determining the approximate amount of hybridization of the probe to the mRNA of the cell, such amount being an indication of the level of expression of the gene in the cell, and thus an indication of the stage of tumor progression of the cell; alternatively, the assay may be carried out with an antibody specific for the gene product of the given marker nucleic acid, contacted with the proteins of the test cell. A battery of such tests will disclose not only the existence and location of a tumor, but also will allow the clinician to select the mode of treatment most appropriate for the tumor, and to predict the likelihood of success of that treatment.

[0182] The methods of the invention may also be used to follow the clinical course of a tumor. For example, the assay of the invention may be applied to a tissue sample from a patient; following treatment of the patient for the cancer, another tissue sample is taken and the test repeated. Successfull treatment will result in either removal of all cells which demonstrate differential expression characteristic of the cancerous or precancerous cells, or a substantial increase in expression of the gene in those cells, perhaps approaching or even surpassing normal levels.

[0183] In yet another embodiment, the invention provides methods for determining whether a subject is at risk for developing a disease, such as a predisposition to develop cancer, associated with aberrant activity of a polypeptide, wherein the aberrant activity of the polypeptide is characterized by detecting the presence or absence of a genetic lesion characterized by at least one of (a) an alteration affecting the integrity of a gene encoding a marker polypeptides, or (b) the mis-expression of the encoding nucleic acid. To illustrate, such genetic lesions may be detected by ascertaining the existence of at least one of (i) a deletion of one or more nucleotides from the nucleic acid sequence, (ii) an addition of one or more nucleotides to the nucleic acid sequence, (iii) a substitution of one or more nucleotides of the nucleic acid sequence, (iv) a gross chromosomal rearrangement of the nucleic acid sequence, (v) a gross alteration in the level of a messenger RNA transcript of the nucleic acid sequence, (vi) aberrant modification of the nucleic acid sequence, such as of the methylation pattern of the genomic DNA, (vii) the presence of a non-wild type splicing pattern of a messenger RNA transcript of the gene, (viii) a non-wild type level of the marker polypeptide, (ix) allelic loss of the gene, and/or (x) inappropriate post-translational modification of the marker polypeptide.

[0184] The present invention provides assay techniques for detecting lesions in the encoding nucleic acid sequence. These methods include, but are not limited to, methods involving sequence analysis, Southern blot hybridization, restriction enzyme site mapping, and methods involving detection of absence of nucleotide pairing between the nucleic acid to be analyzed and a probe.

[0185] Specific diseases or disorders, for example, genetic diseases or disorders, are associated with specific allelic variants of polymorphic regions of certain genes, which do not necessarily encode a mutated protein. Thus, the presence of a specific allelic variant of a polymorphic region of a gene in a subject may render the subject susceptible to developing a specific disease or disorder. Polymorphic regions in genes, may be identified, by determining the nucleotide sequence of genes in populations of individuals. If a polymorphic region is identified, then the link with a specific disease may be determined by studying specific populations of individuals, for example, individuals which developed a specific disease, such as cancer. A polymorphic region may be located in any region of a gene, for example, exons, in coding or non-coding regions of exons, introns, and promoter region.

[0186] In an exemplary embodiment, there is provided a nucleic acid composition comprising a nucleic acid probe including a region of nucleotide sequence which is capable of hybridizing to a sense or antisense sequence of a gene or naturally occurring mutants thereof, or 5′ or 3′ flanking sequences or intronic sequences naturally associated with the subject genes or naturally occurring mutants thereof. The nucleic acid of a cell is rendered accessible for hybridization, the probe is contacted with the nucleic acid of the sample, and the hybridization of the probe to the sample nucleic acid is detected. Such techniques may be used to detect lesions or allelic variants at either the genomic or mRNA level, including deletions, substitutions, etc., as well as to determine mRNA transcript levels.

[0187] An example of a detection method is allele specific hybridization using probes overlapping the mutation or polymorphic site and having about 5, 10, 20, 25, or 30 nucleotides around the mutation or polymorphic region. In one embodiment of the invention, several probes capable of hybridizing specifically to allelic variants are attached to a solid phase support, for example, a “chip.” Mutation detection analysis using these chips comprising oligonucleotides, also termed “DNA probe arrays” is described, for example, by Cronin, et al., (Human Mutation 7:244, 1996). In one embodiment, a chip may comprise all the allelic variants of at least one polymorphic region of a gene. The solid phase support is then contacted with a test nucleic acid and hybridization to the specific probes is detected. Accordingly, the identity of numerous allelic variants of one or more genes may be identified in a simple hybridization experiment.

[0188] In certain embodiments, detection of the lesion comprises utilizing the probe/primer in a polymerase chain reaction (PCR) (see, e.g., U.S. Pat. Nos. 4,683,195 and 4,683,202), such as anchor PCR or RACE PCR, or, alternatively, in a ligase chain reaction (LCR) (see, e.g., Landegran, et al., Science 241:1077-1080, 1988; Nakazaw, et al., Proc. Natl. Acad. Sci. USA 91:360-364, 1994), the latter of which can be particularly useful for detecting point mutations in the gene (see, e.g., Abravaya, et al., Nuc. Acid Res. 23:675-682, 1995). In an illustrative embodiment, the method includes the steps of (i) collecting a sample of cells from a patient, (ii) isolating nucleic acid (e.g., genomic, mRNA, or both) from the cells of the sample, (iii) contacting the nucleic acid sample with one or more primers which specifically hybridize to a nucleic acid sequence under conditions such that hybridization and amplification of the nucleic acid (if present) occurs, and (iv) detecting the presence or absence of an amplification product, or detecting the size of the amplification product and comparing the length to a control sample. It is anticipated that PCR and/or LCR may be desirable to use as a preliminary amplification step in conjunction with any of the techniques used for detecting mutations described herein.

[0189] The invention thus, also encompasses methods of screening for agents which inhibit or enhance the expression of the nucleic acid markers in vitro, comprising exposing a cell or tissue in which the marker nucleic acid mRNA is detectable in cultured cells to an agent in order to determine whether the agent is capable of inhibiting or enhancing production of the MRNA; and determining the level of mRNA in the exposed cells or tissue, wherein a decrease in the level of the MRNA after exposure of the cell line to the agent is indicative of inhibition of the marker nucleic acid mRNA production and an increase in mRNA levels is indicative of enhancement of maker mRNA production.

[0190] Alternatively, the screening method may include in vitro screening of a cell or tissue in which marker protein is detectable in cultured cells to an agent suspected of inhibiting or enhancing production of the marker protein; and determining the level of the marker protein in the cells or tissue, wherein a decrease in the level of marker protein after exposure of the cells or tissue to the agent is indicative of inhibition of marker protein production and an increase on the level of marker protein is indicative of enhancement of marker protein production.

[0191] The invention also encompasses in vivo methods of screening for agents which inhibit or enhance expression of the marker nucleic acids, comprising exposing a subject having tumor cells in which marker mRNA or protein is detectable to an agent suspected of inhibiting or enhancing production of marker mRNA or protein; and determining the level of marker mRNA or protein in tumor cells of the exposed mammal. A decrease in the level of marker mRNA or protein after exposure of the subject to the agent is indicative of inhibition of marker nucleic acid expression and an increase in the level of marker mRNA or protein is indicative of enhancement of marker nucleic acid expression.

[0192] Accordingly, the invention provides a method comprising incubating a cell expressing the marker nucleic acids with a test compound and measuring the MRNA or protein level. The invention further provides a method for quantitatively determining the level of expression of the marker nucleic acids in a cell population, and a method for determining whether an agent is capable of increasing or decreasing the level of expression of the marker nucleic acids in a cell population. The method for determining whether an agent is capable of increasing or decreasing the level of expression of the marker nucleic acids in a cell population comprises the steps of (a) preparing cell extracts from control and agent-treated cell populations, (b) isolating the marker polypeptides from the cell extracts, and (c) quantifying (e.g., in parallel) the amount of an immunocomplex formed between the marker polypeptide and an antibody specific to said polypeptide. The marker polypeptides of this invention may also be quantified by assaying for its bioactivity. Agents that induce an increase in the marker nucleic acid expression may be identified by their ability to increase the amount of immunocomplex formed in the treated cell as compared with the amount of the immunocomplex formed in the control cell. In a similar manner, agents that decrease expression of the marker nucleic acid may be identified by their ability to decrease the amount of the immunocomplex formed in the treated cell extract as compared to the control cell.

### Predictive Assays

[0193] Laboratory-based assays, which can predict clinical benefit from a given anti-cancer agent, will greatly enhance the clinical management of patients with cancer. In order to assess this effect, a biomarker associated with the anti-cancer agent may be analyzed in a biological sample (e.g., tumor sample, plasma) before, during, and following treatment.

[0194] Another approach to monitor treatment is an evaluation of serum proteomic spectra. Specifically, plasma samples may be subjected to mass spectroscopy (e.g., surface-enhanced laser desorption and ionization) and a proteomic spectra may be generated for each patient. A set of spectra, derived from analysis of plasma from patients before and during treatment, may be analyzed by an iterative searching algorithm, which can identify a proteomic pattern that completely discriminates the treated samples from the untreated samples. The resulting pattern may then be used to predict the clinical benefit following treatment.

[0195] Global gene expression profiling of biological samples (e.g., tumor biopsy samples, blood samples) and bioinformatics-driven pattern identification may be utilized to predict clinical benefit and sensitivity, as well as development of resistance to an anti-cancer agent. For example, RNA isolated from cells derived from whole blood from patients before and during treatment may be used to generate blood cell gene expression profiles utilizing Affymetrix GeneChip technology and algorithms. These gene expression profiles may then predict the clinical benefit from treatment with a particular anti-cancer agent.

[0196] Analysis of the biochemical composition of urine by 1D ¹H-NMR (Nuclear Magnetic Resonance) may also be utilized as a predictive assay. Pattern recognition techniques may be used to evaluate the metabolic response to treatment with an anti-cancer agent and to correlate this response with clinical endpoints. The biochemical or endogenous metabolites excreted in urine have been well-characterized by proton NMR for normal subjects (Zuppi, et al., Clin Chim Acta 265:85-97, 1997). These metabolites (approximately 30-40) represent the by-products of the major metabolic pathways, such as the citric acid and urea cycles. Drug-, disease-, and genetic-stimuli have been shown to produce metabolic-specific changes in baseline urine profiles that are indicative of the timeline and magnitude of the metabolic response to the stimuli. These analyses are multi-variant and therefore use pattern recognition techniques to improve data interpretation. Urinary metabolic profiles may be correlated with clinical endpoints to determine the clinical benefit.

### Kits

[0197] The invention further provides kits for determining the expression level of genes characteristic of human breast tumor tissue. The kits may be useful for identifying subjects that are predisposed to developing cancer or who have cancer, as well as for identifying and validating therapeutics for cancer. In one embodiment, the kit comprises a computer readable medium on which is stored one or more gene expression profile of diseased cells of cancer, or at least values representing levels of expression of one or more genes characteristic of human breast tumor tissue in a diseased cell. The computer readable medium can also comprise gene expression profiles of counterpart normal cells, diseased cells treated with a drug, and any other gene expression profile described herein. The kit can comprise expression profile analysis software capable of being loaded into the memory of a computer system.

[0198] A kit can comprise a microarray comprising probes of genes characteristic of human breast tumor tissue. A kit can comprise one or more probes or primers for detecting the expression level or more genes characteristic of human breast tumor tissue and/or a solid support on which probes attached and which can be used for detecting expression of one or more genes characteristic of human breast tumor tissue in a sample. A kit may further comprise nucleic acid controls, buffers, and instructions for use.

[0199] Other kits provide compositions for treating cancer. For example, a kit can also comprise one or more nucleic acids corresponding to one or more genes characteristic of human breast tumor tissue (e.g., for use in treating a patient having cancer). The nucleic acids can be included in a plasmid or a vector (e.g., a viral vector). Other kits comprise a polypeptide encoded by a gene characteristic of cancer or an antibody to a polypeptide. Yet other kits comprise compounds identified herein as agonists or antagonists of genes characteristic of human breast tumor tissue. The compositions may be pharmaceutical compositions comprising a pharmaceutically acceptable excipient.

### EXAMPLES

[0200] It will be apparent to those skilled in the art that the examples and embodiments described herein are by way of illustration and not of limitation, and that other examples may be used without departing from the spirit and scope of the present invention, as set forth in the claims.

### Example 1.

### Gene Expression Profiling Protocol

[0201] A. Tissue Source

[0202] Human breast tumor tissue and normal adjacent tissue were purchased from the National Disease Research Institute.

[0203] B. RNA Extraction and cRNA Preparation

[0204] Total RNA was extracted from the human tissues using TRIzol reagent (Life Technologies, MD) according to a modified vendor protocol which utilizes the RNeasy protocol (Qiagen, CA). After homogenization with a Brinkmann Polytron PT10/35 (Brinkmann, Switzerland) and phase separation with chloroform, samples were applied to RNeasy columns. RNA samples were treated with DNase I using RNase-free DNase Set (Qiagen, CA).

[0205] After elution and quantitation with UV spectrophotometry, each sample was reverse transcribed into double-stranded cDNA using the Gibco Superscript II Choice System for RT-PCR according to vendor protocol (Invitrogen, CA).

[0206] Samples were organically extracted and ethanol precipitated. Approximately 1 μg cDNA was then used in an in vitro transcription reaction incorporating biotinylated nucleotides using an RNA labeling kit (Enzo Diagnostics, NY). The resulting cRNA was put through RNeasy clean-up protocol and then quantified using UV spectrophotometry. The cRNA (15 μg) was fragmented in the presence of MgOAc and KOAc at 94° C. Fragmented RNA (10 μg) was loaded onto each array, one cRNA sample per array. Arrays were hybridized for 16 hours at 45° C. rotating at 60 rpm in an Affymetrix GeneChip Hybridization Oven 640.

[0207] C. Microarray Suite 5.0 Analysis

[0208] Following hybridization, arrays were stained with Phycoerythrin-conjugated Streptavidin, placed in an Agilent GeneArray Scanner and then exposed to a 488 nm laser, causing excitation of the phycoerythrin. The Microarray Suite 5.0 software digitally converts the intensity of light given off by the array into a numeric value indicative of levels of gene expression. Because each array represents a single sample, tumor RNA was compared to the RNA isolated from normal adjacent tissue.

[0209] D. Spotfire Analysis

[0210] The purpose of this analysis is to generate sets of markers to distinguish between breast cancer and normal tissues (nucleic acid sequences SEQ ID NOs. 1-127 and corresponding amino acid sequences SEQ ID NOs. 128-254). Marker Set One (Table 1) represents a set of probe sets that is an optimum set for the prediction of whether or not a tissue is cancerous using a support vector machine. The optimal set is determined to be the one that shows the greatest prediction accuracy with the least error. This marker set was derived using the following method:

[0211] 1. The data was imported into Spotfire.

[0212] 2. A treatment comparison between cancer and normal tissues was performed using the t-test option.

[0213] 3. The following criteria were used to select the probe sets:

[0214] a. The data showed that the probe sets were all not “Absent,” as determined by the Affymetrix Microarray Suite software v. 5.0 (Affymetrix, Inc., Santa Clara, Calif.) for either all of the normal or all of the cancer samples

[0215] b. The data for the probe set showed a p-value of less than or equal to 0.001 according to the t-test.

[0216] 4. All probe sets not meeting these criteria were eliminated from further analysis.

[0217] 5. The remaining data was used in a selection process using custom software in conjunction with a modified version of the svm-train program (C++ version) which is part of LIBSVM (Chang and Lin, LIBSVM: A Library for Support Vector Machines, 2001. Software available from http://www.csie.ntu.edu.tw/˜cjlin/libsvm). The custom software was written in the Perl language v. 5.004. The software was run on an SGI Origin 2000 running the IRIX 6.5.7 f operation system. This software was used in the following manner:

[0218] a. The Perl program was used as a “wrapper” to control svm-train. Its functions were to select subsets of the data and feed these sets to svm-train for training support vector machines (SVM).

[0219] b. Training consisted of many elimination rounds. During each round many support vector machines were trained using ten-fold cross validation in order to estimate accuracy and error. Each SVM was trained on all data except that the data from one probe set was left out. One probe set was eliminated from the data set at each round. This was the probe set that showed the best error and/or accuracy for the SVM when it was eliminated.

[0220] c. Training continued until there was only one probe set left.

[0221] d. The set of probe sets that showed the greatest accuracy with the least error was selected and is shown in Table 1.

[0222] The input arguments to svm-train were −s 0 −t 0 −c 1 −v 10.

[0223] Marker Set Two (Table 2) represents a set of probe sets that is an optimum set for the prediction of whether or not a tissue is cancerous using a support vector machine. The optimal set is determined to be the one that shows the greatest prediction accuracy with the least error. This marker set was derived using the method described for Marker Set One with the following exceptions:

[0224] 1. The data set was not limited to those probe sets that showed a t-test p-value of less than or equal to 0.001.

[0225] 2. Five percent of the probe sets were eliminated at each round until 1000 probe sets remained. Then, only one probe set was eliminated during each round.

[0226] Marker Set Three (Table 3) represents a set of probe sets that is an optimum set for the prediction of whether or not a tissue is cancerous using the Naïve Bayes method. The optimal set is determined to be the one that shows the greatest prediction accuracy. This marker set was derived using the following method:

[0227] 1. The initial set of probe sets was the same as for Marker Set One.

[0228] 2. The probe sets were then subjected to analysis with the Weka software version 3.3.4 (Data Mining: Practical Machine Learning Tools and Techniques with Java Implementations Ian H. Witten, Eibe Frank., Morgan Kaufmann, October 1999)

[0229] a. ForwardSelection search method was used to search for probe sets.

[0230] b. Sets of probe sets were evaluated with the Naive Bayes method.

[0231] c. Ten-fold cross validation was used to select the eight most promising probe sets for further analysis.

[0232] d. Probe sets were eliminated by manual manipulation until the optimal set remained which provided 100% prediction accuracy using the Naïve Bayes method.

[0233] All three marker sets could select which tissues were cancerous and which were normal with 100% accuracy using their respective methods as determined by ten fold cross validation.

TABLE 1
Breast Tumor Marker (Set One)

| SEQ ID | | Gene | | Genbank | Unigene |
|---|---|---|---|---|---|
| NO | Probe Set | Symbol | Title | Accession | Cluster |
| 20 | 202021_x_at | SUI1 | putative translation initiation factor | AF083441.1 | Hs. 150580 |
| 87 | 212914_at | PKP4 | plakophilin 4 | AV648364 | Hs. 152151 |
| 55 | 208671_at | KIAA1253 | KIAA1253 protein | AF164794.1 | Hs. 146668 |
| 102 | 215171_s_at | TIMM17A | translocase of inner mitochondrial membrane 17 homolog A (yeast) | AK023063.1 | Hs. 20716 |
| 10 | 201488_x_at | KHDRBS1 | KH domain containing, RNA binding, signal transduction associated 1 | BC000717.1 | Hs. 119537 |
| 32 | 203636_at | TRIM28 | tripartite motif-containing 28 | BE967532 | Hs. 228059 |
| 104 | 215438_x_at | GSPT1 | G1 to S phase transition 1 | BE906054 | Hs. 2707 |
| 1 | 200762_at | DPYSL2 | dihydropyrimidinase-like 2 | NM_001386.1 | Hs. 173381 |
| 61 | 209307_at | SWAP70 | SWAP-70 protein | BC000616.1 | Hs. 153026 |
| 89 | 213029_at | | Homo sapiens mRNA; cDNA DKFZp564H1916 | AL110126.1 | Hs. 326416 |
| | | | (from clone DKFZp564H1916) | | |
| 15 | 201820_at | KRT5 | keratin 5 (epidermolysis bullosa simplex, Dowling-Meara/Kobner/Weber- | NM_000424.1 | Hs. 195850 |
| | | | Cockayne types) | | |
| 118 | 219078_at | FLJ10252 | hypothetical protein FLJ10252 | NM_018040.1 | Hs. 53913 |
| 13 | 201736_s_at | TEB4 | similar to S. cerevisiae SSM4 | BF000409 | Hs. 3 80875 |
| 103 | 215281_x_at | POGZ | pogo transposable element with ZNF domain | AK000199.1 | Hs. 107088 |
| 125 | 41856_at | | Homo sapiens mRNA; cDNA DKFZp586D0918 | AL049370 | Hs. 13350 |
| | | | (from clone DKFZp586D0918) | | |
| 39 | 204135_at | DOC1 | downregulated in ovarian cancer 1 | NM_014890.1 | Hs. 15432 |
| 17 | 201920_at | SLC20A1 | solute carrier family 20 (phosphate transporter), member 1 | NM_005415.2 | Hs. 78452 |
| 75 | 212115_at | HN1L | HN1 like | AK023154.1 | Hs. 172035 |
| 63 | 209479_at | DKFZP586 | DKFZP586D0623 protein | BC000758.1 | Hs. 44468 |
| | | D0623 | | | |
| 25 | 202373_s_at | RAB3- | rab3 GTPase-activating protein, non-catalytic subunit (150 kD) | AF255648.1 | Hs. 197289 |
| | | GAP150 | | | |
| 83 | 212596_s_at | THC211630 | partial transcript encompassing THC211630 gene | AL079310.1 | Hs. 373557 |
| 119 | 219935_at | ADAMTS5 | a disintegrin-like and metalloprotease (reprolysin type) with | NM_007038.1 | Hs. 58324 |
| | | | thrombospondin type 1 motif, 5 (aggrecanase-2) | | |
| 57 | 208690_s_at | PDLIM1 | PDZ and LIM domain 1 (elfin) | BC000915.1 | Hs. 75807 |
| 109 | 217795_s_at | MGC3222 | hypothetical protein MGC3222 | W74580 | Hs. 323193 |
| 121 | 221729_at | COL5A2 | collagen, type V, alpha 2 | NM_000393.1 | Hs. 82985 |
| 98 | 213893_x_at | PMS2L5 | postmeiotic segregation increased 2-like 5 | AA161026 | Hs. 278895 |
| 79 | 212464_s_at | FN1 | fibronectin 1 | X02761.1 | Hs. 287820 |
| 90 | 213165_at | | Homo sapiens clone CDABP0086 mRNA sequence | AI041204 | Hs. 323748 |
| 68 | 209814_at | HSA6591 | nucleolar cysteine-rich protein | BC004421.1 | Hs. 120766 |
| 24 | 202345_s_at | FABP5 | fatty acid binding protein 5 (psoriasis-associated) | NM_001444.1 | Hs. 153179 |
| 110 | 217836_s_at | YAP | YY1 associated protein | NM_018253.1 | Hs. 18851 |
| 50 | 205547_s_at | TAGLN | transgelin | NM_003186.2 | Hs. 75777 |
| 2 | 200816_s_at | PAFAH1B1 | platelet-activating factor acetylhydrolase, isoform Ib, alpha subunit 45 kDa | NM_000430.2 | Hs. 77318 |
| 14 | 201737_s_at | TEB4 | similar to S. cerevisiae SSM4 | NM_005885.1 | Hs. 20141 |
| 26 | 202404_s_at | COL1A2 | collagen, type I, alpha 2 | NM_000089.1 | Hs. 179573 |
| 49 | 205158_at | RNASE4 | ribonuclease, RNase A family, 4 | NM_002937.1 | Hs. 283749 |
| 11 | 201549_x_at | PLU-1 | putative DNA/chromatin binding motif | NM_006618.1 | Hs. 143323 |
| 40 | 204141_at | TUBB | tubulin, beta polypeptide | NM_001069.1 | Hs. 336780 |
| 48 | 205117_at | FGF1 | fibroblast growth factor 1 (acidic) | X59065 | Hs. 75297 |
| 80 | 212573_at | KIAA0830 | KIAA0830 protein | AL573201 | Hs. 167115 |
| 122 | 222151_s_at | FLJ13386 | hypothetical protein FLJ13386 | AK023738.1 | Hs. 300876 |
| 9 | 201408_at | | ESTs | AI186712 | Hs. 374442 |
| 93 | 213229_at | DICER1 | Dicer1, Dcr-1 homolog (Drosophila) | BF590131 | Hs. 87889 |
| 30 | 203387_s_at | TBC1D4 | TBC1 domain family, member 4 | NM_014832.1 | Hs. 173802 |
| 106 | 216336_x_at | | | AL031602 | |
| 62 | 209451_at | TANK | TRAF family member-associated NFKB activator | U59863.1 | Hs. 146847 |
| 78 | 212227_x_at | SUI1 | putative translation initiation factor | AL516854 | Hs. 150580 |
| 34 | 203640_at | MBLL39 | muscleblind-like protein MBLL39 | BE328496 | Hs. 283609 |
| 127 | 823_at | CX3CL1 | chemokine (C-X3-C motif) ligand 1 | U84487 | Hs. 80420 |
| 41 | 204204_at | SLC31A2 | solute carrier family 31 (copper transporters), member 2 | NM_001860.1 | Hs. 24030 |
| 76 | 212130_x_at | SUI1 | putative translation initiation factor | AL537707 | Hs. 150580 |
| 126 | 74694_s_at | FLJ23282 | hypothetical protein FLJ23282 | AA907940 | Hs. 170253 |
| 18 | 201957_at | PPP1R12B | protein phosphatase 1, regulatory (inhibitor) subunit 12B | AF324888.1 | Hs. 130760 |
| 101 | 214721_x_at | CDC42EP4 | CDC42 effector protein (Rho GTPase binding) 4 | AL162074.1 | Hs. 3903 |
| 44 | 204688_at | SGCE | sarcoglycan, epsilon | NM_003919.1 | Hs. 110708 |
| 27 | 202495_at | TBCC | tubulin-specific chaperone c | NM_003192.1 | Hs. 75064 |
| 22 | 202225_at | CRK | v-crk sarcoma virus CT10 oncogene homolog (avian) | NM_016823.1 | Hs. 343220 |
| 120 | 219956_at | GALNT6 | UDP-N-acetyl-alpha-D-galactosamine: polypeptide N- | NM_007210.2 | Hs. 151678 |
| | | | acetylgalactosaminyltransferase 6 (GalNAc-T6) | | |
| 52 | 208581_x_at | MT1X | metallothionein 1X | NM_005952.1 | Hs. 374950 |
| 12 | 201648_at | JAK1 | Janus kinase 1 (a protein tyrosine kinase) | AL039831 | Hs. 50651 |
| 23 | 202311_s_at | COL1A1 | collagen, type I, alpha 1 | NM_000088.1 | Hs. 172928 |
| 69 | 210438_x_at | SSA2 | Sjogren syndrome antigen A2 (60 kDa, ribonucleoprotein autoantigen SS- | M25077.1 | Hs. 554 |
| | | | A/Ro) | | |
| 124 | 41329_at | LOC57147 | hypothetical protein LOC57147 | AI458463 | Hs. 24243 |
| 81 | 212589_at | RRAS2 | related RAS viral (r-ras) oncogene homolog 2 | BG168858 | Hs. 206097 |
| 8 | 201377_at | KIAA0144 | KIAA0144 gene product | NM_014847.1 | Hs. 8127 |
| 113 | 218062_x_at | CDC42EP4 | CDC42 effector protein (Rho GTPase binding) 4 | NM_012121.2 | Hs. 3903 |
| 72 | 211685_s_at | NCALD | neurocalcin delta | AF251061.1 | Hs. 90063 |
| 107 | 216870_x_at | DLEU2 | deleted in lymphocytic leukemia, 2 | AF264787.1 | Hs. 43628 |
| 95 | 213397_x_at | RNASE4 | ribonuclease, RNase A family, 4 | AI761728 | Hs. 283749 |
| 16 | 201842_s_at | EFEMP1 | EGF-containing fibulin-like extracellular matrix protein 1 | AI826799 | Hs. 76224 |
| 115 | 218823_s_at | FLJ20038 | hypothetical protein FLJ20038 | NM_017634.1 | Hs. 72071 |
| 47 | 204976_s_at | AMMECR1 | Alport syndrome, mental retardation, midface hypoplasia and elliptocytosis | AK023637.1 | Hs. 326142 |
| | | | chromosomal region, gene 1 | | |
| 85 | 212724_at | ARHE | ras homolog gene family, member E | BG054844 | Hs. 6838 |
| 43 | 204619_s_at | CSPG2 | chondroitin sulfate proteoglycan 2 (versican) | BF590263 | Hs. 81800 |
| 4 | 200961_at | SPS2 | selenophosphate synthetase 2 | NM_012248.1 | Hs. 118725 |
| 29 | 203356_at | | Homo sapiens cDNA FLJ36423 fis, clone THYMU2011308 | BE349584 | Hs. 377946 |
| 53 | 208662_s_at | TTC3 | tetratricopeptide repeat domain 3 | D84294.1 | Hs. 118174 |
| 86 | 212730_at | DMN | desmuslin | AK026420.1 | Hs. 10587 |
| 37 | 203973_s_at | CEBPD | CCAAT/enhancer binding protein (C/EBP), delta | NM_005195.1 | Hs. 76722 |
| 21 | 202037_s_at | SFRP1 | secreted frizzled-related protein 1 | NM_003012.2 | Hs. 7306 |
| 5 | 201012_at | ANXA1 | annexin A1 | NM_000700.1 | Hs. 78225 |

[0234] TABLE 2
Breast Tumor Marker (Set Two)

| | | Gene | | Genbank | Unigene |
|---|---|---|---|---|---|
| SEQ ID NO | Probe Set | Symbol | Title | Accession | Cluster |
| 97 | 213647_at | DNA2L | DNA2 DNA replication helicase 2-like (yeast) | D42046.1 | Hs.194665 |
| 91 | 213180_s_at | GOSR2 | golgi SNAP receptor complex member 2 | BE730204 | Hs.100651 |
| 65 | 209635_at | AP1S1 | adaptor-related protein complex 1, sigma 1 subunit | BC003561.1 | Hs.57600 |
| 3 | 200925_at | COX6A1 | cytochrome c oxidase subunit VIa polypeptide 1 | NM_004373.1 | Hs.180714 |
| 33 | 203854_at | IF | I factor (complement) | NM_000204.1 | Hs.36602 |
| 96 | 213620_s_at | ICAM2 | intercellular adhesion molecule 2 | AA126728 | Hs.347326 |
| 59 | 209157_at | DNAJA2 | DnaJ (Hsp40) homolog, subfamily A, member 2 | AF011793.1 | Hs.21189 |
| 54 | 208663_s_at | TTC3 | tetratricopeptide repeat domain 3 | D84294.1 | Hs.118174 |
| 64 | 209621_s_at | ALP | alpha-actinin-2-associated LIM protein | AF002280.1 | Hs.135281 |
| 51 | 208158_s_at | OSBPL1A | oxysterol binding protein-like 1A | NM_018030.1 | Hs.252716 |
| 19 | 201989_s_at | CREBL2 | cAMP responsive element binding protein-like 2 | NM_001310.1 | Hs.13313 |
| 60 | 209268_at | VPS45A | vacuolar protein sorting 45A (yeast) | AF165513.1 | Hs.6650 |
| 105 | 215696_s_at | KIAA0310 | KIAA0310 gene product | BC001404.1 | Hs.5716 |
| 78 | 212227_x_at | SUI1 | putative translation initiation factor | AL516854 | Hs.150580 |
| 73 | 211896_s_at | DCN | decorin | AF138302.1 | Hs.76152 |
| 114 | 218226_s_at | NDUFB4 | NADH dehydrogenase (ubiquinone) 1 beta subcomplex, 4, 15 kDa | NM_004547.2 | Hs.227750 |
| 71 | 211285_s_at | UBE3A | ubiquitin protein ligase E3A (human papilloma virus E6-associated | U84404.1 | Hs.180686 |
| | | | protein, Angelman syndrome) | | |
| 77 | 212153_at | POGZ | pogo transposable element with ZNF domain | AB007930.1 | Hs.107088 |
| 84 | 212722_s_at | PSR | phosphatidylserine receptor | AK021780.1 | Hs.72660 |
| 6 | 201018_at | EIF1A | eukaryotic translation initiation factor 1A | BE542684 | Hs.4310 |
| 74 | 211961_s_at | RAB7 | RAB7, member RAS oncogene family | AK000826.1 | Hs.356386 |
| 20 | 202021_x_at | SUI1 | putative translation initiation factor | AF083441.1 | Hs.150580 |
| 36 | 203951_at | CNN1 | calponin 1, basic, smooth muscle | NM_001299.1 | Hs.21223 |
| 112 | 218039_at | ANKT | nucleolar protein ANKT | NM_016359.1 | Hs.279905 |
| 82 | 212590_at | RRAS2 | related RAS viral (r-ras) oncogene homolog 2 | BG168858 | Hs.206097 |
| 56 | 208684_at | COPA | coatomer protein complex, subunit alpha | U24105.1 | Hs.75887 |
| 67 | 209766_at | PRDX3 | peroxiredoxin 3 | AF118073.1 | Hs.75454 |
| 28 | 203213_at | CDC2 | cell division cycle 2, G1 to S and G2 to M | AL524035 | Hs.334562 |
| 99 | 214196_s_at | CLN2 | ceroid-lipofuscinosis, neuronal 2, late infantile (Jansky-Bielschowsky | AA602532 | Hs.20478 |
| | | | disease) | | |
| 45 | 204719_at | ABCA8 | ATP-binding cassette, sub-family A (ABC1), member 8 | NM_007168.1 | Hs.38095 |
| 70 | 210835_s_at | CTBP2 | C-terminal binding protein 2 | AF222711.1 | Hs.171391 |
| 100 | 214693_x_at | DJ328E19.C1.1 | hypothetical protein DJ328E19.C1.1 | BE732345 | Hs. 218329 |
| 68 | 209814_at | HSA6591 | nucleolar cysteine-rich protein | BC004421.1 | Hs. 120766 |
| 116 | 218930_s_at | FLJ11273 | hypothetical protein FLJ11273 | NM_018374.1 | Hs. 3542 |
| 123 | 39582_at | | Homo sapiens mRNA; cDNA DKFZp586D1122 | AL050166 | Hs. 26295 |
| | | | (from clone DKFZp586D1122) | | |
| 42 | 204257_at | FADS3 | fatty acid desaturase 3 | NM_021727.1 | Hs. 21765 |
| 46 | 204905_s_at | EEF1E1 | eukaryotic translation elongation factor 1 epsilon 1 | NM_004280.1 | Hs. 298581 |
| 108 | 217106_x_at | HSA9761 | putative dimethyladenosine transferase | AF091078.1 | Hs. 125819 |
| 92 | 213225_at | PPM1B | protein phosphatase 1B (formerly 2C), magnesium-dependent, beta | AJ271832.1 | Hs. 5687 |
| | | | isoform | | |
| 66 | 209687_at | CXCL12 | chemokine (C-X-C motif) ligand 12 (stromal cell-derived factor 1) | U19495.1 | Hs. 237356 |
| 117 | 219064_at | MGC10848 | hypothetical protein MGC10848 | NM_030569.1 | Hs. 207443 |
| 7 | 201143_s_at | EIF2S1 | eukaryotic translation initiation factor 2, subunit 1 alpha, 35 kDa | BC002513.1 | Hs. 151777 |
| 94 | 213361_at | PCTAIRE2BP | tudor repeat associator with PCTAIRE 2 | AW129593 | Hs. 283761 |
| 119 | 219935_at | ADAMTS5 | a disintegrin-like and metalloprotease (reprolysin type) with | NM_007038.1 | Hs. 58324 |
| | | | thrombospondin type 1 motif, 5 (aggrecanase-2) | | |
| 121 | 221729_at | COL5A2 | collagen, type V, alpha 2 | NM_000393.1 | Hs. 82985 |
| 111 | 217901_at | | Homo sapiens, clone IMAGE: 4242700, mRNA | BF031829 | Hs. 348710 |
| 38 | 204017_at | KDELR3 | KDEL (Lys-Asp-Glu-Leu) endoplasmic reticulum protein retention | NM_006855.2 | Hs. 250696 |
| | | | receptor 3 | | |
| 61 | 209307_at | SWAP70 | SWAP-70 protein | BC000616.1 | Hs. 153026 |
| 58 | 208944_at | TGFBR2 | transforming growth factor, beta receptor II (70/80 kDa) | D50683.1 | Hs. 82028 |
| 35 | 203810_at | DNAJB4 | DnaJ (Hsp40) homolog, subfamily B, member 4 | BG252490 | Hs. 41693 |
| 31 | 203567_s_at | TRIM38 | tripartite motif-containing 38 | NM_006355.1 | Hs. 59545 |
| 88 | 213006_at | CEBPD | CCAAT/enhancer binding protein (C/EBP), delta | AV655640 | Hs. 76722 |
| 9 | 201408_at | | ESTs | AI186712 | Hs. 374442 |
| 37 | 203973_s_at | CEBPD | CCAAT/enhancer binding protein (C/EBP), delta | NM_005195.1 | Hs. 76722 |
| 126 | 74694_s_at | FLJ23282 | hypothetical protein FLJ23282 | AA907940 | Hs. 170253 |
| 29 | 203356_at | | Homo sapiens cDNA FLJ36423 fis, clone THYMU2011308 | BE349584 | Hs. 377946 |
| 5 | 201012_at | ANXA1 | annexin A1 | NM_000700.1 | Hs. 78225 |
| 1 | 200762_at | DPYSL2 | dihydropyrimidinase-like 2 | NM_001386.1 | Hs. 173381 |
| 44 | 204688_at | SGCE | sarcoglycan, epsilon | NM_003919.1 | Hs. 110708 |

The application's sequence listing, which the Patent Office published only in electronic form, follows.

SEQUENCE LISTING (254 sequences)

SEQ ID NO: 1 - DNA, 4459 bp, Homo sapiens
gtttctctctctccttctctctctctctctctctctcttttttttccgccctagctggggctgtgttggaggagaggaagaaagagagacagaggattgcattcatccgttacgttcttgaaatttcctaatagcaagaccagcgaagcggttgcacccttttcaatcttgcaaaggaaaaaaacaaaacaaaacaaaaaaaacccaagtccccttcccggcagtttttgccttaaagctgccctcttgaaattaattttttcccaggagagagatgtcttatcaggggaagaaaaatattccacgcatcacgagcgatcgtcttctgatcaaaggaggtaaaattgttaatgatgaccagtcgttctatgcagacatatacatggaagatgggttgatcaagcaaataggagaaaatctgattgtgccaggaggagtgaagaccatcgaggcccactcccggatggtgatccccggaggaattgacgtccacactcgtttccagatgcctgatcagggaatgacgtctgctgatgatttcttccaaggaaccaaggcggccctggctgggggaaccactatgatcattgaccacgttgttcctgagcctgggacaagcctgctcgctgcctttgaccagtggagggaatgggccgacagcaagtcctgctgtgactactctctgcatgtggacatcagcgagtggcataagggcatccaggaggagatggaagcgcttgtgaaggatcacggggtaaattccttcctcgtgtacatggctttcaaagatcgcttccagctaacggattgccagatttatgaagtactgagtgtgatccgggatattggcgccatagcccaagtccacgcagaaaatggcgacatcattgcagaggagcagcagaggatcctggatctgggcatcacgggccccgagggacatgtgctgagccgacctgaggaggtcgaggccgaagccgtgaatcgtgccatcaccatcgccaaccagaccaactgcccgctgtatatcaccaaggtgatgagcaaaagctctgctgaggtcatcgcccaggcacggaagaagggaactgtggtgtatggcgagcccatcactgccagcttgggaacggacggctcccattactggagcaagaactgggccaaggctgctgcctttgtcacctccccacccttgagccctgatccaaccactccagactttctcaactccttgctgtcctgtggagacctccaggtcacgggcagtgcccattgcacgtttaacactgcccagaaggctgtaggaaaggacaacttcaccctgattccggagggcaccaatggcactgaggagcggatgtccgtcatctgggacaaggctgtggtcactgggaagatggatgagaaccagtttgtggctgtgaccagcaccaatgcagccaaagtcttcaacctttacccccggaaaggccgcattgctgtgggatccgatgccgacctggtcatctgggaccccgacagcgttaaaaccatctctgccaagacacacaacagctctctcgagtacaacatctttgaaggcatggagtgccgcggctccccactggtggtcatcagccaggggaagattgtcctggaggacggcaccctgcatgtcaccgaaggctctggacgctacattccccggaagcccttccctgattttgtttacaagcgtatcaaggcaaggagcaggctggctgagctgagaggggttcctcgtggcctgtatgacggacctgtgtgtgaagtgtctgtgacgcccaagacagtcactccagcctcctcggccaagacgtctcctgccaagcagcaggccccacctgtccggaacctgcaccagtctggattcagtttgtctggtgctcagattgatgacaacattccccgccgcaccacccagcgtatcgtggcgccccccggtggccgtgccaacatcaccagcctgggctagagctcctgggctgtgcgtccactggggactggggatgggacacctgaggacattctgagacttctttcttccttcctttttttttttttgtttttttttttaagagcctgtgatagttactgtggagcagccagttcatggggtcccccttggggccccacaccccgtctctcaccaagagttactgattttgctcatccacttccctacacatctatgggtatcacacccaagactacccaccaagctcatacagggaaccacacccaacacttagacatgcgaacaagcagcccccagcgagggtctccttcgccttcaacctcctagtgtctgttagcatcttccttttcatggggggagggaagataaagtgaattgcccagagctgcctttttcttttctttttaaaaattttaagaagttttccttgtggggctggggaggggccggggtcagggagagtctttttttttttttttttaaatactaaattggaacatttaattccatattaatacaaggggtttgaactggacatcctaatgatgcaattacgtcatcacccagctgattccgggtggttggcaaactcatcgtgtctgtcctgagaggctccacaatgcccacccgcatcgccattctgtagtcttcagggtcagctgttgataaaggggcaggcttgcgttattggcctagattttgctgcagattaaatcctttgaggattctcttctcttttaccatttttctgcgtgctctcactctctctttctctctctagctttttaattcatgaatattttcgtgtctgtctctctctctctctgtgtttcctccagcccttgtctcggagacggtgttttcctcccttgccccattatcttttcacctcccaggtctaccatttcatggtggtcgttgggtccgcctaaaggatttgagcgtttgccattgcaagcatagtgctgtgtcatcctggtccatgtaggactggtgctaaccacctgccatcatgaggatgtgtgctagagtgtgggaccctggccaagtgcaggaatgggccatgccgtctcacccacagtatcacacgtggaaccgcagacagggcccagaagctttagaggtatgaggctgcagaaccggagagattttcctctgtgcagtgctctctggctaaagtcacggtcaaacctaaacaccgagcctcattaacccaagtgaaccaaccaaagtcaccagttcagaagtgctaagctaataggagtctgacccgagggcctgctgcttcctggttaagtatcttttgagattctagaacacatgggagctttttattttcggggaaaaaccgtatttttttcttgtccaattatttctaaagacacactacatagaaagaggccctataaactcaaaaagtcattgggaaacttaaagtctattctactttgcaagaggagaaatgtgttttatgaacgatagatcacatcagaactcctgtggggaggaaaccttataaattaaacacatggcccccttagagaccacaggtgatgtctgtctccatccttccctctccttttctgtcacctttccccctagctggctcctttggacctacccctgtccttgctgacttgtgttgcattgtattccaaacgtgtttacaggttctcttaagcaatgttgtatttgcaggcttttctgaataccaaatctgctttttgtaaagcgtaaaaacatcacaaagtaggtcattccatcaccacccttgtctctctacacattttgcctttggggatctggttggggttttgggttttttgttgttgttgtttatttgttattttaaaggtaaattgcacttttaaaaaaataattggttgacttaatatatttgctttttttctcacctgcacttagaggaaatttgaacaagttggaaaaaaacaatttttgtttcaattctaagaaacacttgcagctctagtattcacttgagtcttcctgtttttcctgtaccgggtcatggtaatttttggttgttttggttgttttcttaaaaaacaagttaaaacctgacgatttctgcaggctgtgtaagcatgtttacctgttggcttgctttgtgtgtctgttaaatgaatgtcatatgtaaatgctaaaataaatcgacagtgtctcagaactgaataactgcagtgacttgatgctctaaaacagtgtaggatttaagaatagatggtttttaatcctggaaattgtgattgtgacccatgagtggaggaactttcagttctaaagctgataaagtgtgtagccagaagagtacttttttttttgtaaccactgtcttgatggcaaaataattatggtaaaaaacaagtctcgtgtttattattccttaagaactctgtgttatattaccatggaacgcctaataaagcaaaatgtggttgtttc

SEQ ID NO: 2 - DNA, 5581 bp, Homo sapiens
agctcctgtgacagacggagctggagcggcggggcggcggcggagtccggcggccgggagagcgagtgagcgagcggaggagcagcgacacgggagtctagggagcgagaaggagaaggaggggagcgctcgggcgcgagcgagagaaaccgcgagcgccgagcttggactcgagccccggaacggctgaggagcccgcccgctcccctcccctccccctccccgggcccgggcccagcgcgccatcctcccccctccttccctccctccctccttcctccctcccctctccctccccctcccccgccggtggatgggagtgaaggacggaagaggcccggcggaggcggcggtgcagcgctccggtggaatgaatcttacttgttgaatatcttctggttactagttggattcatttgtgaaagaatcattttcccctgtgtggaagacacttagtggcatatttaaattataagtccacggatcaaaaagctttttgatttcccaaaggagggacataccactatatcagataagcttgacattacagccaagatggtgctgtcccagagacaacgagatgaactaaatcgagctatagcagattatcttcgttcaaatggctatgaagaggcatattcagtttttaaaaaggaagctgaattagatgtgaatgaagaattagataaaaagtatgctggtcttttggaaaaaaaatggacatctgttattagattacaaaagaaggttatggaattagaatcaaagctaaatgaagcaaaagaagaatttacgtcaggtggacctcttggtcagaaacgagacccaaaagaatggattccccgtccgccagaaaaatatgcattgagtggtcacaggagtccagtcactcgagtcattttccatcctgtgttcagtgttatggtctctgcttcagaggatgctacaattaaggtgtgggattatgagactggagattttgaacgaactcttaaaggacatacagactctgtacaggacatttcattcgaccacagcggcaagcttctggcttcctgttctgcagatatgaccattaaactatgggattttcagggctttgaatgcatcagaaccatgcacggccatgaccacaatgtttcttcagtagccatcatgcccaatggagatcatatagtgtctgcctcaagggataaaactataaaaatgtgggaagtgcaaactggctactgtgtgaagacattcacaggacacagagaatgggtacgtatggtacggccaaatcaagatggcactctgatagccagctgttccaatgaccagactgtgcgtgtatgggtcgtagcaacaaaggaatgcaaggctgagctccgagagcatgagcatgtggtagaatgcatttcctgggctccagaaagctcatattcctccatctctgaagcaacaggatctgagactaaaaaaagtggtaaacctgggccattcttgctgtctggatccagagacaagactattaagatgtgggatgtcagtactggcatgtgccttatgaccctcgtgggtcatgataactgggtacgtggagttctgttccattctggggggaagtttattttgagttgtgctgatgacaagaccctacgcgtatgggattacaagaacaagcgatgcatgaagaccctcaatgcgcatgaacactttgttacctccttggatttccacaagacggcaccctatgtcgtcactggcagcgtagatcaaacagtaaaagtgtgggagtgccgttgattgtgtctccttcggcccctcctccctcttttcctctggatgcactctgatgataccatggttaccccattgagctctgtttaaataaatattgtcctttcatgtaaattattctggatgtagattgagcttattaaatgttacacacaaagtattcatgcatggtgaatccaaattgtatactgtaaatttacatacgttgtctagaagtaccatagggtttaaaaacctgggctggcattggtcacaccaggcctaagaaggcagaagttgaatcaattgaactagggcactaaactgaatagttgacagtgtcattttatgttggattattaattcctgtttttctttctgctatctgttggtgcctgacttgatggcctcatttggggaaaagtggtggttattagggcttttcctgaaatgtgtatctatgtaacatcacttaagtgtgcttaataaatctcctgtaaggattttagatgataaggctacaattcagaatcttctgaaccatctatgtaatgaatggggattatacattggaatttttgtcatgacacatttgccaaatcagtaggatatatttgttttggcagcctatcacgcagaggctagtggtatatttatgtaagaaaatgactgtaaatctcaagaaaaatctcagcagctaatagcaactcatttatttcattttggtcttaatgctttgtaaacaggtcaaaaaatactgtcatactctaagcttctattttccacactggacatacttctagttgtattctccatactattagactgtgtagtgatgtgacttccaagtagaatttaatctccccattgagtgtgtcatggtacaaatcactattcgtttttggtgttttttagggatgtgcaatgtgcattacataatgacagaaatactgagaaggttctgtgtgcccatttgaaaggagtgggaggaatacagcagtttgtttttcaacatgaatctgatattgatttaaactgtgtttcacttacaagttttaaaaaaatgacagggtttaatggagcgtgcataaaaatgtactgttttcaccttttgtttatatgtaaatgtttgtaagtatatgggcctatctgtaagtgggtaagtctgtatgtgtgtatcatacacatcaacctccatgtccttagtcctgggtttttgaaaaagtgctaaaacggacaagtagaataaatgttgctgtggaatgccatgctttagaacaaaccctttttgatcttaatgcttctgaaaactaggtctgactctggggatttttttccagccgaaggaaaatcacttccgttatgtccccctctaatttagccgctcgacattttacacaacccggatatgttgtatattttgacccaaagttacaggtaggtttaagagaatttttagccatgacttttggagcactattccattgtcagttattaataaagaattccattgcttagctaaccaacaggttttttttgtttccaagagagttatttgaaaagttaacagaacaatgagataacagtgacagtttaacaaagataaaattctgaactgcgttttattcatttgtgtactatgtgattttttaaatgtcccctttagtatttaatggaaaattggttcctgcaaaagacaaagggtgagagttagcgtcctgtagatacacacagagactaggccgtatattaactagaagcagctttatgtctagcttgtgtctttttgtttgtttgcttgtttgtttttagattcctgagagatgtctctggaagggaaagttttgagaactaatggctatttttgaggacaaaaattacatcttaagctaattccttaaatacatacagtaggtgaattttcaggacaatattgcctcacaaccctgcttacattgaaaagtctttttcccttagctcttctgactggatttttctacaaaactatggaaaatatctttgttcttgtttgctgctattttctgtcctattttgagaaatataaatacatagaaatggtgcatcttaacatttgtttgtacatgtataaatgtcttgtattttaattcatttttagcatgaattgtttaagggtaagccacaacatctagaaatcactcatagatattgaacaataaaggagaatggtaccgatgcaggaggaagcaagcgtgtcttcccctgcagcacacagcgacttgcgttgacaaaggaggaggaaacgattactctgtaaacaaagttatccttacttgggagattgccacagcctgctgctgagttgagttaccagacatcctccatgtgagaagcagcgaacattgaatctcagggatggcccacaactgggtccacatgtaatgagccctgtttaataacgaaggggtgggggagagcagtccgtctacaacctggaatcagatttgcaaaatttcctgcactgctgtctgacactgtcctgttgatgccctttctgactgtgttctctgttttctctgtctgctgtctaaccctgtgccttgcctgggataaggacaatgatgaggttactggtttggattgtaagtagaggacttttattaattggtttagaggttcactgctgctttgtcactttctcaatcaaattggccacttaagaaataaagagctggtagaattgcatcctcagatgattattgactgtgtgtgtgtgtgaaaacagacattccagtgccacccaaatatatatctgtaacgtgcccaagaaatcctagctgcgctcttgagagtgcatgccatggagactggtttagacaccgcgtggagcctagttgcctgttgtcacggcatcttgcactttaggagactaagaccgtcctggttcgtctgtgtgtggtgtgaccaatggtgtgcccagagcactactctcaaaatcactagtgttagcaagtcgtcccgggctggggagcgttcgccgtagtctttggaagctttggctttagatttaccaagccccgcctccccgctgccagtgccctgctctcccgttcgcctctttctgtttctgtgtgaactttcccggtaatatcactcgttaaataggttttctttaaacttaattaaggaaaaactatttaaaggtaaaggatattttgttgacatcggtggctcgatcatccttaagcaactgaagttaaaattgttgaaggaaaaggcacttaaattggttactttcatgtccagctgtatataagtccagtgtgttcatctagatgacgcaaagaatctcctggtagagaagcgacatgtaaaaaactggtggaaaaaggttttggattttttttccagtggggtggggggagggcaagctggatttacaggtcacggctggactgaatgggcctttttatcttcccactgtatcatggaagtagctgcttgcttgtactgtccatccttcaggcatccctaaagctcactctgaagatgttagagacaaacacaaactcttcgagttaaagttgatcctgacactgacatgaaggcaagccttgatttcgtatgaacgttgctgaagtggtaattgaggaaaacagttccccagattgttaagagttcactgaagatattgacacaattttaaaaaatcagtaaaggaatgtatataatattgctctcgtgttttacagtaagatttgttgctctcagactgtgtaaaacaaaatttattcatgttttctgcatattaaaaaatcttattgtaccaactggtaaaccg

SEQ ID NO: 3 - DNA, 548 bp, Homo sapiens
cggcgctgcggcagtccagatcaaaaatggcggtagttggtgtgtcctcggtttctcggctgctgggtcggtcccgcccacagctggggcggcctatgtcgagtggcgcccatggcgaagagggctcagctcgcatgtggaagactctcaccttcttcgtcgcgctccccggggtggcagtcagcatgctgaatgtgtacctgaagtcgcaccacggagagcacgagagacccgagttcatcgcctacccccatctccgcatcaggaccaagccgtttccctggggagatggtaaccatactctattccataaccctcatgtgaatccacttccaactggctacgaagatgaataaagagaatctggaccactacccgggcaccagggaccacagcactggtttggaccgttactctgcacatggaccagaaaaagtatatgggaccttaagctaaccttctttacttgtatcaaatgatgactggtatactggtctcccatccctttgcttgtggcaggagatggcttaaataaataacttaaactt

SEQ ID NO: 4 - DNA, 2291 bp, Homo sapiens
aaataagggagtccggcggctcctctatcaggaagattgtgcatgccgtgggtctgacggcttgagtagcgctagggagaatccctgcaggtaatatttgacttttgcttcatattaatctgagtggaaaataaaagggccctcttctcctctcgcttccctgccgggcaggcgccatggcggaagcctcggcgacgggcgcctgcggagaggcgatggcagcggcggaaggctcctcgggcccggcgggcttgactctgggccggagcttctcgaactaccggcccttcgagccccaggcgttgggcctcagcccgagctggcggctgacgggcttctccggcatgaagggctgaggctgcaaggtcccgcaggaggcgctgctcaaactcctggcgggactgacgcggccggacgtgcggcccccgctgggccggggcctggtgggtggccaggaagaggcgtcccaggaagccggcctgccggcaggagcgggccccagccccacctttccagccctgggcatcgggatggactcctgcgtcatccccctgaggcacgggggcctgtcactggtgcagaccacggacttcttttaccccttggtagaagatccctacatgatggggcgcatagcttgtgccaacgtgctgagtgacctctacgccatggggattactgagtgtgacaacatgttgatgttactcagcgtcagccagagtatgagtgaggaggaacgcgaaaaggtaacgccactcatggtcaaaggctttcgggatgcggctgaggaaggagggacggcagtgaccggtgggcaaacggtggtcaacccttggattataatcggtggagttgccactgtagtatgccaaccaaatgagttcataatgccggacagcgccgtcgttggggacgtgctggtgttaaccaaaccgttaggaacccaggttgctgtcaatgcccaccaatggctggataatcctgaaagatggaataaagtaaagatggtggtctccagagaagaggtggagctggcctatcaggaagccatgttcaatatggctaccctcaacagaactgctgcaggtttaatgcacacatttaatgcccatgcggccacagatatcacaggctttggcattctaggacactcccagaaccttgcaaaacaacaaagaaatgaagtgtcctttgttattcataatctgccaataattgccaagatggctgccgtcagcaaggccagtggacggtttgggcttcttcaaggaacctcagctgaaacctctgggggattactgatttgtctgccaagagaacaggcggctcgcttttgttctgaaatcaaatcctccaagtacggagagggtcaccaagcgtggatcgttggcattgtggaaaagggaaaccgaacggcccggatcattgacaagccgcgagttattgaagtcctgcctcgtggggccacagctgctgttcttgctcctgacagttcaaatgcctcctctgagcctagctcgtgagatgaaagaacagaagttgtttggaccttagagccattgtccacaatcacggatggttctcaagagttgattgtaagaaatttccaaagaaggctgcctgcatagtggttccggctgccctttctaggtgattggaatcagcccatctaaagcagtctttatatgcattccgaggccagagtaacattttgaactttggggggatatttgttcatcacttgggtagaagaggagcaaaaatacctctgttttctcttgccaaagtaagatgaagctattccaggttgagggatttttctttgcacggggttgattaatttctgcacagggagtgagattattaaagtaacacacacacaaagtaaattgcaaaatgaaaaaaattagaagcaaatgagttttggaccaatattgttgataaatctaaattgttaagagagatcttataatgcaacatcaaattctttattcaattttactgaagtactggctctttcctgctctggacaagaattgagcaacttgtctgatgactgggaaaggaggacctgcaaccatctgacttggtctctgttaatgacgtctctccctctaaaccccattaaggactgggagaggcagagcaagcctcagagcccaggcctcagtggtcattaagatgttaagtcttttgcggcagattcctggtgatttgatcaataaagagtaatttcttgctaaataaataaaagaaaccttgttgaaaaactaaaaaaaaaaaaaaaaaaa

SEQ ID NO: 5 - DNA, 1399 bp, Homo sapiens
agtgtgaaatcttcagagaagaatttctctttagttctttgcaagaaggtagagataaagacactttttcaaaaatggcaatggtatcagaattcctcaagcaggcctggtttattgaaaatgaagagcaggaatatgttcaaactgtgaagtcatccaaaggtggtcccggatcagcggtgagcccctatcctaccttcaatccatcctcggatgtcgctgccttgcataaggccataatggttaaaggtgtggatgaagcaaccatcattgacattctaactaagcgaaacaatgcacagcgtcaacagatcaaagcagcatatctccaggaaacaggaaagcccctggatgaaacacttaagaaagcccttacaggtcaccttgaggaggttgttttagctctgctaaaaactccagcgcaatttgatgctgatgaacttcgtgctgccatgaagggccttggaactgatgaagatactctaattgagattttggcatcaagaactaacaaagaaatcagagacattaacagggtctacagagaggaactgaagagagatctggccaaagacataacctcagacacatctggagattttcggaacgctttgctttctcttgctaagggtgaccgatctgaggactttggtgtgaatgaagacttggctgattcagatgccagggccttgtatgaagcaggagaaaggagaaaggggacagacgtaaacgtgttcaataccatccttaccaccagaagctatccacaacttcgcagagtgtttcagaaatacaccaagtacagtaagcatgacatgaacaaagttctggacctggagttgaaaggtgacattgagaaatgcctcacagctatcgtgaagtgcgccacaagcaaaccagctttctttgcagagaagcttcatcaagccatgaaaggtgttggaactcgccataaggcattgatcaggattatggtttcccgttctgaaattgacatgaatgatatcaaagcattctatcagaagatgtatggtatctccctttgccaagccatcctggatgaaaccaaaggagattatgagaaaatcctggtggctctttgtggaggaaactaaacattcccttgatggtctcaagctatgatcagaagactttaattatatattttcatcctataagcttaaataggaaagtttcttcaacaggattacagtgtagctacctacatgctgaaaaatatagcctttaaatcatttttatattataactctgtataatagagataagtccattttttaaaaatgttttccccaaaccataaaaccctatacaagttgttctagtaacaatacatgagaaagatgtctatgtagctgaaaataaaatgacgtcacaagac

SEQ ID NO: 6 - DNA, 4456 bp, Homo sapiens
  misc_feature (6)..(6): n is a, c, g, or t
  misc_feature (8)..(11): n is a, c, g, or t
  misc_feature (17)..(18): n is a, c, g, or t
  misc_feature (1104)..(1104): n is a, c, g, or t
  misc_feature (1149)..(1149): n is a, c, g, or t
  misc_feature (1167)..(1167): n is a, c, g, or t
  misc_feature (1231)..(1232): n is a, c, g, or t
  misc_feature (1251)..(1251): n is a, c, g, or t
  misc_feature (1259)..(1259): n is a, c, g, or t
  misc_feature (1284)..(1284): n is a, c, g, or t
  misc_feature (3017)..(3017): n is a, c, g, or t
  misc_feature (3020)..(3020): n is a, c, g, or t
  misc_feature (3690)..(3690): n is a, c, g, or t
  misc_feature (3704)..(3704): n is a, c, g, or t
  misc_feature (3798)..(3798): n is a, c, g, or t
  misc_feature (3969)..(3969): n is a, c, g, or t
  misc_feature (4433)..(4433): n is a, c, g, or t
  misc_feature (4436)..(4438): n is a, c, g, or t
  misc_feature (4452)..(4453): n is a, c, g, or t
atacgncnnnnggcgcnntttgctgccgccgagcgtggacgcaggcggatctctgaagagctgggtcgccagcctctcccgcgcacgttgcctggcctccagcacctacttggtcccgcgcgctccctcgtgtcgcccctcggagcagcagccgccgcggtcgccgctacccggaaagaagtcagagacgccgcgaggtcgccgccaccgccatgcccaagaataaaggtaaaggaggtaaaaacagacgcaggggtaagaatgagaatgaatctgaaaaaagagaactggtattcaaagaggatggtcaggagtatgctcaggtaatcaaaatgttgggaaatggacggctagaagcaatgtgtttcgatggtgtaaagaggttatgtcacatcagaggaaaattgagaaaaaaggtttggataaatacctcggacattattttggttggtctccgagactaccaggataacaaagctgatgtaattttaaaatacaatgcagacgaagctagaagtctgaaggcatacggcgagcttccagagcatgctaaaatcaatgaaactgatacatttggtcctggagatgatgatgaaattcagtttgatgacattggagatgatgatgaagatattgatgacatctaaattgaactcaacattttacattccatcttttctgaagattgtcctacaatttggattttgatcatgacaaagaagattaaaatttcattagcatgaatgcaatttgttaaagcagactgatttgtttctaagatatttttggtttttttaaaactgataataatgctgaattatcttaagtgagatgttaagcccactttgttcttttaatgtaatggagcttatgggtagaagaccatgtctactaattacaaaaaaaaaaaaaaaaccatgcattgctgcttttcctaccacttccagtaagaaaatgggtgttttgaagaaatcatttgccttgtcctcacggaatctgattaagccctggcctcttgattgtatagagtcattgtgtatattccagttacctagatattcccttgagattttgatacaatttgagggaggcagaagtctgcanttgaagaaaaaaaataagtctgtttgtcatatttaagtagcctgntggctatttttatactgnattttgatatcatgttcttttcatagtcgtattttgccaccgtaaacataaaaaaaaaaaaaannatttccaaaatgccgtttncagaaccngggttttaatagcagtattgaattngtaagcttagtagttgcagaaattgaacactaggtggcactcagttatcttaacaggggaagtactgatacaattgttgacttttcttttactatgtgtaagaaataccccaaacatgaaaagattgttttgatcatatgcatgtatgtagaatatttttgcagagcagaaagattatgttagaagtgtgatttttattttcagaagtcatatacatgtaagctacaattttgagtgctttataaacacttaagatatatatataaattttaatttcatagcaacttgtaaaaaataaaatacttgttgaaaagcctttttcaacatatccctaagctaagggaagaggaaggaataacaactcagtgaaaagatggtctccagtttctgaatgaaaaagctacagctgagaaataaaataaaatgtcatgctgcagaatatgttatacccttattttgtgttaaggatatattttattatgtgaatggttttgtttttgttttttgtttttgttttttgcttgtattgggaattagctttactggtaacttccttatttagtttttagtggtcaactctaataaaatgaaactagggctgagctagttagccctcactagccaaactgaaactctatgcaacattaaaagaagagatccatcatgtagcttgtgacacttttattttattagtcaccggggaacttttcagtgatgaaaatacacagggtaataaaccttcacatggcttcaaaaggaaaacaagcaaatcttctctaatctactcttactataatttcctaagtgtacaccaaactctggatttaaaaatctgaagtactatagaacattaagttgaagaatggaaattaagagtacgtattcatggtttatatttcttattctatggagttcgtgaacacatctaggtggaatgcatctgagactaagggctggtttttaatcctcataagaaaccagccttgaagaattaacaattctcttcattggtattctaaacctcctaagatatttaggcttctgtacataaaagtgtttttgctaaatttacagtatatatagatcctttcatattattttactaagaatgtttgaactttgcatatttgatatagttcctggtaggaatagcacagctcaaacattagtttttctacttacctcctctaacacgtggtttgtctggagagtttctaaaaattcagctataaccccagttcatgtatttactggtgattgttcttgctgaggtagtaacagcccaatcttgggctgttaaatcctaggaaatctcgaatcatagtgattaaaatagttggggtaaagttgtagcttatatgcaatactacttggaggaattcttctactaatttgtatttaatgtggaaattgtatagtttcattgatttaatcataaataatggaaatggtctccaagaagttttatttttcatttttttgcttatacactctgattcctataatacagtgctataagctatgcacagaaaataaaatgtttgaaatccaagaataatggttcttactgctaagagggagtaatagttattactaatgattttgattgggttgcatttttgttgcaatgtttattccacttgcagttagaatatgaatatgttttatcactagtgtggctaaataaccaaacatttgtgtaaaaaaaaaaaaaagccaagatttcattgttngtngaatatttcttaagcatctggcccctaaagagaccgcttcttaccaagcctgtaaactatgcatgatggaaattcttgtattttatttaggaatggctgttggtttactcaccacatctgtggaatcatggctataaatgtttgcttacaaactctttgtgacttgtaatttaacttaatctcatctaatgtaaatattagattatgatgttcagtaacatcttccataggtataaactgctgtcattattgatttcagagtaactctgagtaatcaaataggtaaaagcatgttttgagtaaaatagctagatttatactttacttgtatacagacttaacaacaaccggtattgactggattgacagctaaagtatcagaatgaaagcaaggtttttttgatgttacctgactgtcataaagatgaaaatgatttgtattggtatgaaatgcttatctttattctacttcgtaagggtaagttttatttatactctttggactcccatgaacttttgcacactgctttgtgtttttggtttaccctaaactaccatcctttttatctttgctttttttcttcctattcagaaaagagcaaaatgtgaaaagacacaagactctcaggtatagaatgaactgagcaatttggagaatgtattggacttngtcctctcttattnccccctcctagccctgcaagttgctaggtacttgtgaggcagtgtactggagaggggagagcatggatcctggggtcaaagggcctttgccccnacccttacttggccctctacctgcaggtgaccactggcacattctcctgcttgtctcagcttcaggttcttcacctctaagatggggatgatgaaaacagtacctgtcatgcagaattgttgggaggattgataatttagatgtttatacatgtaatgtacttagatcagntgtctgctcttttcacttgatatccagtactatgtaagatagaaggtgcatgtcttctgtattctgtatttcccatttcttttgcgtgcagtctttgattcgtacaatagaaggaacacgtagaatgtatatttgtacattcatgtcaacatagtatttgaaattgctaccaaactcatttaatttggcataagactaacagatgaagtctctcatttgcttgaagatattttacaaaataccaactgttctatatttctttagaaaaagattatagttattaatattgatacctctgataatattttattcttaaatcttcagtgattccttttactatagattcatgacagctaattagtactaactgatttagaggtttcctttcccatcatatggaatgatgtaaagaaatcagatacaaactactgcaattagaaaataaaatatgaacaactttcaanaannnaaaaaaaaaaaaanngct

SEQ ID NO: 7 - DNA, 2983 bp, Homo sapiens
ggcggccggtgagggggaagcaagtctggtctctgtgattgaagaagtcggctctgggctccagtgcgggaatcacacacatacctcagaatgccgggtctaagttgtagattttatcaacacaaatttcctgaggtggaagatgtagtgatggtgaatgtcagatccattgctgaaatgggggcttatgtcagcttgctggaatacaacaacattgaaggcatgattcttcttagtgaattatccagaaggcgtatccgttctatcaacaaactcatccgaattggcaggaatgagtgtgtggttgtcattagggtggacaaagaaaaaggatatattgatttgtcaaaaagaagagtttctccagaggaagcaatcaaatgtgaagacaaattcacaaaatccaaaactgtttatagcattcttcgtcatgttgctgaggtgttagaatacaccaaggatgagcagctggaaagcctattccagaggactgcctgggtctttgatgacaagtacaagagacctggatatggtgcctatgatgcatttaagcatgcagtctcagacccatctattttggatagtttagatttgaatgaagatgaacgggaagtactcattaataatattaataggcgcttgaccccacaggctgtcaaaattcgagcagatattgaagtggcttgttatggttatgaaggcattgatgctgtaaaagaagccctaagagcaggtttgaattgttctacagaaaacatgcccattaagattaatctaatagctcctcctcggtatgtaatgactacgacaaccctggagagaacagaaggcctttctgtcctcagtcaagctatggctgttatcaaagagaagattgaggaaaagaggggtgtgttcaatgttcaaatggagcccaaagtggtcacagatacagatgagactgaacttgcgaggcagatggagaggcttgaaagagaaaatgccgaagtggatggagatgatgatgcagaagaaatggaagccaaagctgaagattaactttgtgggaaacagagtccaatttaaggaacacagagcagcgcttcctggctgtaaatcctagacttgaaagttttccagtattgaaaacttcaaagctgaatattttttatttctaagtatttaaatgttctaacagatcagaacatgaaatgccctcctaaatgtcagctgttgtcacacagtagctccaacactttgagcatttttaagggagtggcctcatttcactagagacaaatctttaagaatagttctaaaattgggcttgtgatttccatttctgatgtctccagattggcacccctttctagttcaatgcctcacgagatttgccaggggcatccaaggcaaacaatcccaatctttctatataaaatgtattcaagcaaacatcaaataaatttctgggatatttaactataggcttcttccttcttgtcaccagttaaaagcattttaatactaagaccctaattcttttatctttattttagtcttgatgtggaactgtaggagcaggtgaataaaggatctctataacagatcctttcaaaagaagagttttagagaaaataaatttaactttaaccacagtgaaagttgacccttagcgggacaaagccttaaaatgcattgaaagaattagatcggttctgtgccttttatctatttgagattgatgacaacctgtgtgagagaatttatcacaccacgtccttattggaataataagctacttgccttgagtttataattcagggtggtaaagtatgtttttaaattttaaaaagcagctgcattttttatttagttggaatatcacccaattttttatttttattgctattaaaatatccactagatgccacctagagctccagttctttataacaaaacagggatctgtttgaacacttactgttgtttttttttttttacatgtttccatcatttctgtctttaagaactaattcgtacataataagtttcataggtaacacattatattctcttatgatacttgaggtaccagttgtatttaattttattcattatccctagatagctattaagatacttagattagacctaacccaccatagtcaatccaagactagactactcaatattaaagggtctggaaaatagaagagtgtgttgggcaggtagtttgtaccatttatgaaggtttgttcctttgttaaatttagcagcctgtactagcttttgaaatccagaagttttaacttccagtggctggtttctgagagagtgccatgattgctagccagcattccatattgggaatatgtagaggagaacctggatgtacttaagagtggcatataattttcacttctgtctgttgaggcaaaaaaaaaacaagtttagaaagctggcaacatgaagaatgcattcaaaatataacaggtgcttctttgttgtacgcagaggaattttttcttttgattttgtttactgaaatttgttatacttcaaaagccataacttgaaaaatactggtggcgtcgatggtgagtgatttttatcccacgtgggccttttgctcagttccatggcaattttgtaaattgaccctagccagagaatagatcagtatttcactgataccacgaggaaaagaacaaacaaaacttaaaagtattcatacaccttgctaacctaaaagacagcagggacaagatacatatgaggacaaggtatacacccagttctgaataacttgaagaacaggcttggcaaagaagtaagtttatccaaatcttgaatttctgccaggcatggtagctcatgcctgtaaccctggcacttaaggggccaaggcaggaggatcacttgaggccagtgagctgtgatcactccagtgcactcgagcctgggtgacagggcaagaccctgtctcaaaaaaaaaaaaaaaaaa

SEQ ID NO: 8 - DNA, 3411 bp, Homo sapiens
cccgactaagtgacttaaactcccacctactcctggaataaggagtcaaagcccggataggcgcagtattctaccttgtaaatactgttatttgtatatactgtaaatgatgacatcggtgggcactaaccgagcccggggaaactgggaacaacctcaaaaccaaaaccagacacagcacaagcagcggccacaggccactgcagaacaaattagacttgcacagatgatttcggaccataatgatgctgactttgaggagaaggtgaaacaattgattgatattacaggcaagaaccaggatgaatgtgtgattgctttgcatgactgcaatggagatgtcaacagagctatcaatgttcttctggaaggaaacccagacacgcattcctgggagatggtcgggaagaagaagggagtctcaggccagaaggatggtggccagacggaatccaatgaggaaggcaaagaaaatcgagaccgggacagagactatagtcggcgacgtggtgggccaccaagacgggggagaggtgccagccgtggacgagagtttcgaggtcaggaaaatggattggatggcaccaagagtggagggccttctggaagaggaacagaaagaggcagaaggggccgtggccgaggcagaggtggctctggtaggcgaggaggaaggttttctgctcaaggaatgggaacctttaacccagctgattatgcagagccagccaatactgatgataactatggcaatagcagcggcaatacgtggaacaacactggccactttgaaccagatgatgggacgagtgcatggaggactgcaacagaggagtgggggactgaagattggaatgaagatctttctgagaccaagatcttcactgcctctaatgtgtcttcagtgcctctgcctgcggagaatgtgacaatcactgctggtcagagaattgaccttgctgttctgctggggaagacaccatctacaatggagaatgattcatctaatctggatccgtctcaggctccttctctggcccagcctctggtgttcagtaattcgaagcagactgccatatcacagcctgcttcagggaacacattttctcatcacagtatggtgagcatgttagggaaaggatttggtgatgtcggtgaagctaaaggcggcagtactacaggctcccagttcttggagcaattcaagactgcccaagccctggctcagttggcagctcagcattctcagtctggaagcaccaccacctcctcttgggacatgggctcgacgacacaatccccatcactggtgcagtatgatttgaagaacccaagtgattcagcagtgcacagcccctttacaaagcgccaggcttttaccccatcttcaaccatgatggaggtgttccttcaggagaagtcacctgcagtggctacctccacagctgcacctccacctccgtcttctcctctgccaagcaaatccacatcggctccacagatgtcgcctggatcttcagacaaccagtcctctagccctcagccggctcagcagaaactgaaacagcagaagaaaaaagcctccttgacttctaagattcctgctctggctgtggagatgcctggctcagcagatatctcagggctaaacctgcagtttggggcattgcagtttgggtcagagcctgtcctttctgattatgagtccacccccaccacgagcgcctcttcaagccaggctccaagtagcctgtataccagcacggccagtgaatcatcctctacaatttcatctaaccagagtcaggagtctggttatcagagcggcccaattcagtcgacaacctatacctcccaaaataatgctcagggccctctttatgaacagagatccacacagactcggcggtaccccagctccatctcttcatcaccccaaaaggacctgactcaggcaaagaatggcttcagttctgtgcaggccacgcagttacagaccacacaatctgttgaaggtgctacaggctctgcagtgaaatctgattcaccttccacttctagcatcccccctctcaatgaaacggtatctgcagcttccttactgacgacaaccaatcagcattcatcctccttgggtggcttgagccacagtgaggagattccaaatactaccaccacacaacacagcagcacgttatctacgcagcagaataccctttcatcatcaacatcttctgggcgcacttcgacatccactcttttgcacacaagtgtggagagtgaggcgaatctccattcttcctccagcactttttccaccacatccagcacagtctctgcacctcccccagtggtcagtgtctcctccagtctcaatagtggcagtagcctgggcctcagcctaggcagcaactccactgtcacagcctcgactcgaagctcagttgctacgacttcaggaaaagctcctcccaacctccctcctggggtcccgccgttgttgcctaatccgtatattatggctccagggctgttacatgcctacccgccacaagtatatggttatgatgacttgcagatgcttcagacaagatttccattggattactacagcatcccatttcccacacccactactccgctgactgggagggatggtagcctggccagcaacccttattctggtgacctcacaaagttcggccgtggggatgcctcctccccagccccggccacaaccttggcccaaccccaacagaaccagacgcagactcaccataccacgcagcagacattcctgaacccggcgctgcctcctggctacagttacaccagcctgccatactatacaggggtcccgggcctccccagcaccttccagtatgggcctgctgtgttccctgtggctcctacctcttccaagcagcatggtgtgaatgtcagtgtgaatgcatcggccacccctttccaacagccgagtggatatgggtctcatggatacaacactggaagaaaatatccacccccttacaagcatttctggacggctgagagctaatttggcccaaggctgggggctgtgttttgtgtgtgtgtataaatttgcactgaagtcttgtttcagaaaccagaccactgaggagagcctgctgagctgaggccatggcctgcgtggcttggggaaatgagttggtggataccttctgggcttttgaacttgcccctcccccatttccctctcccccatgtgtctgaccctgtcttacccatttcaagttcaagcggtgcagcaccttcgaagcatcaatgcacacacctgctgttgcttttgatttctggaaggcatgtagtttcaacttgtaacaaaaatatttgtagtcttcaataaactgtggtatttctttagctaac

SEQ ID NO: 9 - DNA, 4906 bp, Homo sapiens
  misc_feature (134)..(138): n is a, c, g, or t
  misc_feature (140)..(140): n is a, c, g, or t
  misc_feature (459)..(460): n is a, c, g, or t
  misc_feature (1925)..(1925): n is a, c, g, or t
  misc_feature (2182)..(2182): n is a, c, g, or t
  misc_feature (2185)..(2185): n is a, c, g, or t
  misc_feature (2187)..(2189): n is a, c, g, or t
  misc_feature (2191)..(2192): n is a, c, g, or t
  misc_feature (2194)..(2194): n is a, c, g, or t
  misc_feature (2196)..(2198): n is a, c, g, or t
  misc_feature (2201)..(2201): n is a, c, g, or t
  misc_feature (2207)..(2209): n is a, c, g, or t
  misc_feature (2236)..(2236): n is a, c, g, or t
  misc_feature (2324)..(2324): n is a, c, g, or t
  misc_feature (2340)..(2340): n is a, c, g, or t
  misc_feature (2362)..(2362): n is a, c, g, or t
  misc_feature (2426)..(2426): n is a, c, g, or t
  misc_feature (2823)..(2823): n is a, c, g, or t
  misc_feature (2978)..(2978): n is a, c, g, or t
  misc_feature (2980)..(2981): n is a, c, g, or t
  misc_feature (2984)..(2988): n is a, c, g, or t
  misc_feature (2990)..(2992): n is a, c, g, or t
  misc_feature (2994)..(3001): n is a, c, g, or t
  misc_feature (3003)..(3006): n is a, c, g, or t
  misc_feature (3163)..(3163): n is a, c, g, or t
  misc_feature (3251)..(3251): n is a, c, g, or t
  misc_feature (3386)..(3386): n is a, c, g, or t
  misc_feature (3391)..(3391): n is a, c, g, or t
  misc_feature (3578)..(3578): n is a, c, g, or t
  misc_feature (3595)..(3595): n is a, c, g, or t
  misc_feature (3598)..(3603): n is a, c, g, or t
  misc_feature (3836)..(3836): n is a, c, g, or t
  misc_feature (3847)..(3847): n is a, c, g, or t
  misc_feature (3855)..(3855): n is a, c, g, or t
  misc_feature (4216)..(4216): n is a, c, g, or t
  misc_feature (4231)..(4231): n is a, c, g, or t
  misc_feature (4554)..(4554): n is a, c, g, or t
  misc_feature (4879)..(4880): n is a, c, g, or t
cctgggtctgacgcggccctgttcgagggggcctctcttgtttatttatttattttccgtgggtgcctccgagtgtgcgcgcgctctcgctacccggcggggagggggtggggggagggcccgggaaaaggggnnnnngnagccggggtcgaaacgccgcgtgacttgtaggtgagagaacgccgagccgtcgccgcagcctccgccgccgagaagcccttgttcccgctgctgggaaggagagtctgtgccgacaagatggcggacggggagctgaacgtggacagcctcatcacccggctgctggaggtacgaggatgtcgtccaggaaagattgtgcagatgactgaagcagaagttcgaggcttatgtatcaagtctcgggagatctttctcagccagcctattcttttggaattggaagcaccgctgaaaatttgtggagatattcatggacanntatacagatttactgagattatttgaatatggaggtttcccaccagaagccaactatcttttcttaggagattatgtggacagaggaaagcagtctttggaaaccatttgtttgctattggcttataaaatcaaatatccagagaacttctttctcttaagaggaaaccatgagtgtgctagcatcaatcgcatttatggattctatgatgaatgcaaacgaagatttaatattaaattgtggaagaccttcactgattgttttaactgtctgcctatagcagccattgtggatgagaagatcttctgttgtcatggaggattgtcaccagacctgcaatctatggagcagattcggagaattatgagacctactgatgtccctgatacaggtttgctctgtgatttgctatggtctgatccagataaggatgtgcaaggctggggagaaaatgatcgtggtgtttcctttacttttggagctgatgtagtcagtaaatttctgaatcgtcatgatttagatttgatttgtcgagctcatcaggtggtggaagatggatatgaattttttgctaaacgacagttggtaaccttattttcagccccaaattactgtggcgagtttgataatgctggtggaatgatgagtgtggatgaaactttgatgtgttcatttcagatattgaaaccatctgaaaagaaagctaaataccagtatggtggactgaattctggacgtcctgtcactccacctcgaacagctaatccgccgaagaaaaggtgaagaaaggaattctgtaaagaaaccatcagatttgttaaggacatacttcataatatataagtgtgcactgtaaaaccatccagccatttgacaccctttatgatgtcacacctttaacttaaggagacgggtaaaggatcttaaatttttttctaatagaaagatgtgctacactgtattgtaataagtatactctgttatagtcaacaaagttaaatccaaattcaaaattatccattaaagttacatcttcatgtatcacaatttttaaagttgaaaagcatcccagttaaactagatgtgatagttaaaccagatgaaagcatgatgatccatctgtgtaatgtggttttagtgttgcttggttgtttaattattttgagcttgttttgtttttgtttgttttcactagaataatggcaaatacttctaatttttttccctaaacatttttaaaagtgaaatatgggaagagctttacagacattcaccaactattattttcccttgtttatctacttagatatctgtttaatcttactaagaaaactttcgcctcattacattaaaaaggaattttagagattgattgttttaaaaaaaaatacgcacattgtccaatccagtgattttaatcatacagtttgactgggcaaactttacagctgatagtgaatatttngctttatacaggaattgacactgatttggatttgtgcactctaatttttaacttattgatgctctattgtgcagtagcatttcatttaagataaggctcatatagtattacccaactagttggtaatgtgattatgtggtaccttggctttaggttttcattcgcacggaacaccttttggcatgcttaacttcctggtaacaccttcacctgcattggttttctttttcttttttctttctttttttttttttttnttntnnngnntngnnnttngttttnnnatccacagtacatgagaatcctttttngacaagccttggaaagctgacactgtctctttttcctccctctatacgaaggatgtatttaaatgaatgctggtcagtgggacatttngtcaactatgggtatngggtgcttaactgtctaatatngccatgtgaatgttgtatacgattgtaaggcttatgtcactaaagatttttattctgatttttncataatcaaaggtcatatgatactgtatagacaagctttgtagtgaagtatagtagcaataatttctgtacctgatcaagtttattgcagcctttcttttcctatttcttttttttaagggttagtattaacaaatggcaatgagtagaaaagttaacatgaagattttagaaggagagaacttacaggacacagatttgtgattctttgactgtgacactattggatgtgattctaaaagcttttattgagcattgtcaaatttgtaagcttcatagggatggacatcatatctataatgcccttctatatgtgctaccatagatgtgacatttttgaccttaatatcgtctttgaaaatgttaaattgagaaacctgttaacttacattttatgnattggcacattgtattacttactgcaagagatatttcattttcagcacagtgcaaaagttctttaaaatgcatatgtctttttttctaattccgttttgttttaaagcacattttaaatgtagttttctcatttagtaaaagttgtctaattganannaannnnnannnannnnnnnntnnnntacagtgagacatttaagcacacattttattcacatagatactatgtccttgacatattgaaatgattcttttctgaaagtattcatgatctgcatatgatgtattaggttaggtcacaaaggttttatctgaggtgatttaaataacttcctgatnggagtgtgtaagctgagcgatttctaataaaattttagttgtacacttttagtagtcatagtgaagcaggtctagaaaataagccttnggcagggaaaaagggcaatgttgattaatctcagtattaaaccacattaatctgtatcccattgtctggcttttgtaaattcatccaggtcaagactaagtatgttggttaataggaatcctttttttttttttnaaagnactaaatgtgaaaaaataatcactacttaagctaattaatattggtcattaaatttaaaggatggaaatttatcatgtttaaaaattattcaagcactcttaaaaccacttaaacagcctccagtcataaaaatgtgttctttacaaatatttgcttggcaacacgacttgaaataaataaaacttngtttcttaggagaaaangannnnnnaattccagtgtcactaatttatattgttctttcctctgatttttttcaggttagtgatttttttgtatacaatttaatccaaatgttatgacattcagaaatcatgaaacacagtagatatctgttataatgtggtgtatcacatggattataaagcaaagttatggtcgatttctattcttgaaagaatcaactacagtgaatcctttgcatttgaagccttaacatgcatngctttaatttngcccaggnacaaattttaataatcagcaagactggtttgtgcaaagcgttgagtcatcaggtatttagagcctagccagctacccagtatccatgctgccatatcccttcattgtaaaaagtacctaaacattcgtgaaatgattttttttagctgaaaaatgctggcaagaagaattttaaagcttaaaataggtggtaaatttgaagtatgagtgtgttcacgagaaacataggcttttcaaaaaaatttttattcaaggcaaagcaaggaacatcttgagatatgtctcaagaatataaagatgtattattttaagccaaggagctgaaatatatctcagtttataaattcaggtatattcttttngtctccatggcaacnataacttttgaaccaaaaaaaattgtttttacatctttatgctgaaaatgtgtttagattaggaatatggtcgggctgaatttgctgttgctccctaaccaaatccacctcttgttttccttgtgagtccatggctaaatcaaagctgcccctgagaagagacttaatccaagcctgattgtactagtggcatcacttagaagtaggctttccctcttcctagtagatctcaatgttttataattccttaaaacagctgaaaattgggacaacatactttacgcaatgaacagtagttaaataggaaataaactagttccatntaagtatacacctagagttttaattacctttataatgtttcttaaaagtgaaacttagatacaattgtgattggatacttagatactaagtgaaacttagtgtaacaattttgatctgttaaattggattttacatgtacatttgaatgccagaatttctaaataaatcccctggttaggaaattttaaaagtcaaagcttgttttcttcaaccactaccttctacattggttgacttagaccgtaagctttttaagtttctcattgtaatttaccttctcatgcagattgctgatgttttattaaaccttatttttacaaaaannaaaaaaaaaaaaaaaaaaaaaaaaaa

SEQ ID NO: 10 - DNA, 1795 bp, Homo sapiens
ctcgggtcggcttcggtcgctaccgctcccgctctgccacccccgccaaccgccgctcgggcctccgtcgctgccgcgtcgctttctcgctccttggatcgcacatcctcccagatgcagcgccgggacgaccccgccgcgcgcatgagccggtcttcgggccgtagcggctccatggacccctccggtgcccacccctcggtgcgtcagacgccgtctcggcagccgccgctgcctcaccggtcccggggaggcggagggggatcccgcgggggcgcccgggcctcgcccgccacgcagccgccaccgctgctgccgccctcggccacgggtcccgacgcgacagtgggcgggccagcgccgaccccgctgctgcccccctcggccacagcctcggtcaagatggagccagagaacaagtacctgcccgaactcatggccgagaaggactcgctcgacccgtccttcactcacgccatgcagctgctgacggcagaaattgagaagattcagaaaggagactcaaaaaaggatgatgaggagaattacttggatttattttctcataagaacatgaaactgaaagagcgagtgctgatacctgtcaagcagtatcccaagttcaattttgtggggaagattcttggaccacaagggaatacaatcaaaagactgcaggaagagactggtgcaaagatctctgtattgggaaagggctcaatgagagacaaagccaaggaggaagagctgcgcaaaggtggagaccccaaatatgcccacttgaatatggatctgcatgtcttcattgaagtctttggacccccatgtgaggcttatgctcttatggcccatgccatggaggaagtcaagaaatttctagtaccggatatgatggatgatatctgtcaggagcaatttctagagctgtcctacttgaatggagtacctgaaccctctcgtggacgtggggtgccagtgagaggccggggagctgcacctcctccaccacctgttcccaggggccgtggtgttggaccacctcggggggctttggtacgtggtacaccagtaaggggagccatcaccagaggtgccactgtgactcgaggcgtgccacccccacctactgtgaggggtgctccagcaccaagagcacggacagcgggcatccagaggatacctttgcctccacctcctgcaccagaaacatatgaagaatatggatatgatgatacatacgcagaacaaagttacgaaggctacgaaggctattacagccagagtcaaggggactcagaatattatgactatggacatggggaggttcaagattcttatgaagcttatggccaggacgactggaatgggaccaggccgtcgctgaaggcccctcctgctaggccagtgaagggagcatacagagagcacccatatggacgttattaaaaacaaacatgaggggaaaatatcagttatgagcaaagttgttactgatttcttgtatctcccaggattcctgttgctttacccacaacagacaagtaattgtctaagtgtttttcttcgtggtccccttcttctccccaccttattccattcttaactctgcattctggcttctgtatgtagtattttaaaatgagttaaaatagatttaggaatattgaattaattttttaagtgtgtagatgcttttttctttgttgtttaaatataaacagaagtgtaccttttataataaaaaaaagaagttgagtaaaaaaaaaaaaaaaaaaaaaaaaaaaaaaaaaaaaaa

SEQ ID NO: 11 - DNA, 7450 bp, Homo sapiens
  misc_feature (11)..(11): n is a, c, g, or t
ttcagtctgtnaaaggatacccccgttgtgaatttcgtacctgtatgaccagagacacctcaaattcaaaatgtccagaaatgaacacagtatcttcttcccttgagtaactcgccttctgtatataattggggtgaatgttccagcaatgccaacgggctagcatctactcaggcaggtacgccagacatctgaatcttaatacctcgtcgtcccccctcaatctgtcactatgtcctaattttatttcctacctttgcatcccttcctcataattatcagcaccactgccttaatttagatcctatcattccttgtctggattatttcaagtcttttgcccctctcaagtctgacctcgtcatagactgtttgtggatgattattttccctgcaacatctccacctcccaatagtctccatcacttattagccatgtgaattatggcaaattgcttaacctacctatgcctcacttttccttattgtaaagtggaaataagagtacctatctcatagggttgtgtgattaatcatgcgatgcaattagaacagtgcctaggatatgaaagtgccccaaaatgttacgttattattattattactactattgccttctcatgaacatgctatgtgtatgttcaagctgttatctctactggaaaatccttctccgtttccaatactctttccaaaaccccctcctgggttttactgcacctaccattgtgtactgacgtgattgaatgattggcttatgggactgatcctttctaccagacttaacttcttcagggcaggaactctgatacatagtaaatggtcaataaaagttggctcaactgaaaccctaaggataaactccatccacagcggaagagcgcggccccgcccgattcgggggcggggcggggagccgcgcgcggagggtgggtcgatgggggtggggtgggactctttttcctcgccgtggcggcggaggcgcacggcgtgggcttgcggcgagacgtcgtcgtcggaggctgaaaaagcccaaggtgctgccgttgcccgtacaactcggacttgctgttgctcgagccgcgtctgcacgggtctcggaccgagcggagctcgcagcctcggtcccggagcccaccttcgcctcgcccttgcccagcctgcggtgatggaggcggccaccacactgcacccaggcccgcgcccggcgctgcccctcgggggcccgggcccgctgggcgagttcctgcctccacccgagtgcccggtcttcgaacccagctgggaagagttcgcggaccccttcgctttcatccacaagatccggcccatagccgagcagactggcatctgtaaggtgcggccgccgccggattggcagccaccatttgcatgtgatggtgataaacttcattttacgccacgtatccagagactgaatgaattggaggcccaaactcgtgtaaaattgaatttcttggaccagattgcaaagtactgggagttacagggaagtactctgaaaattccacatgtggagaggaagatcttggacttatttcagcttaataagttagttgcagaagaaggtggatttgcagttgtttgcaaggatagaaaatggaccaaaattgctaccaagatggggtttgctcctggcaaagcagtgggctcacatatcagagggcattatgaacgaattctcaacccctacaacttattcctgtccggagacagcctaaggtgtttgcagaagccaaacctgaccacagacactaaggacaaggagtacaaaccccatgatattccccagaggcagtctgtgcagccttcggaaacgtgccccccagcccgacgagcaaaacgcatgagagcagaggccatgaatattaaaatagaacccgaggagacaacagaagccagaactcataatctgagacgtcgaatgggttgtccaactccaaaatgtgaaaatgagaaagaaatgaagagtagcatcaagcaagaacctattgagaggaaagattatattgtagaaaatgagaaggaaaagcccaagagtcgatctaaaaaagccaccaatgctgtggacctgtatgtctgtcttttatgtggcagtggcaatgatgaagaccggctactgttgtgtgatggctgtgatgacagttaccataccttttgcttgatcccacctctccatgatgttcccaagggagactggaggtgtcctaagtgtttggctcaggaatgtagtaagccacaagaagcatttggctttgaacaagcagccagggactataccctccgtacttttggggaaatggcagatgcgttcaaatctgattacttcaacatgccagtccatatggtccccacagagcttgttgagaaagaattttggagactagtaagcactattgaggaggatgtcacagtggaatatggagctgacattgcctcaaaggaatttggcagtggctttcctgtccgagatgggaaaatcaaactctcacctgaggaagaggagtatcttgatagtggctggaatttgaacaacatgccagtgatggagcagtctgtccttgcacatattactgctgatatatgtggcatgaaacttccttggttgtatgtgggaatgtgcttttcttcattctgttggcacattgaagaccactggagctattcaattaactacttgcactggggtgagccaaaaacctggtatggagtcccagggtatgctgctgagcagctagaaaatgtaatgaagaaactagctccagaactctttgtgtcccagccggatctcctccatcagcttgtgaccatcatgaaccccaataccctgatgactcatgaagtgcctgtttaccgaactaatcagtgtgctggggagtttgtgattacatttccaagagcctaccacagtggttttaaccagggttttaattttgctgaggctgttaacttctgcactgttgattggctgccattaggccgacagtgtgtggagcattatcgcttgcttcatcgatattgtgtgttttcccatgatgagatgatctgcaagatggcttccaaggctgatgtattagatgttgtagtggcttcaactgttcagaaagacatggccattatgattgaggatgagaaagctttaagagaaactgtccgtaaattgggagtgattgattcggaaagaatggattttgagctgttgccagatgatgaacgtcagtgtgtaaaatgcaaaactacatgcttcatgtctgccatctcctgttcttgtaaacctggccttcttgtttgcctgcatcatgtaaaagaattgtgttcctgtcctccttataaatataaattgcggtataggtacacgctggatgatctctaccctatgatgaatgcattgaagcttcgagcagaatcttacaacgaatgggccttgaatgtgaatgaagctttggaggcaaagatcaccaagaagaaaagccttgtcagcttcaaggctttaattgaagaatctgaaatgaagaaattcccagacaatgatcttttgcgacaccttcgcctagtcacacaggatgcagagaagtgtgcctctgttgcgcagcagttgcttaatggcaaaaggcaaactagatatcgatctggtggagggaaatcccaaaatcagttgacagtgaatgagctccggcagtttgtaacacagctgtatgctcttccatgtgtcctcagtcagacaccattactaaaggatctcttgaatcgtgtagaagattttcaacagcatagtcagaaactactctctgaggaaacgcctagtgctgcggagctgcaggacttgctagatgtcagctttgaatttgatgttgaacttccacagcttgctgagatgcgtatccgtttggaacaagcccgttggctagaagaggtgcagcaagcttgcctagaccccagctcccttactttagatgatatgagacgtctcatagacctaggggtagggctggccccgtattcagcagtggagaaagctatggcccggctgcaggaactgctcacagtgtcagagcactgggacgacaaagccaagagtctcctcaaggccaggccacgacattcattgaatagccttgctacggcagtaaaggaaatcgaagagatccctgcatatctgcccaatggtgcggctctgaaagactcagtgcagagagccagagactggcttcaggatgtagagggcctgcaggctggaggacgtgtgccagtgttagacacactcatagaacttgttacacgaggccgatctatcccggtacatctgaattctttgccaagactggaaaccctagtagctgaggttcaggcttggaaagaatgtgctgttaatacattcttgactgagaattctccatattctctcttagaggtgctgtgtcctcgatgtgatattggccttttgggattgaaaaggaagcagagaaagttaaaggagcccttgccaaatggaaagaaaaaaagcaccaaattagagagtctgagtgacctggagagagctttaactgaaagcaaggagactgcttcagctatggcaactcttggggaagctcgcctaagggaaatggaagccttgcagtctctcagactcgccaatgaagggaaattgctgtcgcctctccaagatgtggatataaaaatctgcctatgtcagaaggccccagctgcccctatgattcaatgtgaactctgcagggatgctttccacaccagttgtgtggcggtacccagtatttcacagggcctgcgaatctggctttgtccccattgtcggaggtcagagaaacctccattagagaaaattctgcccctgctcgcctcccttcagcgtatccgagttcgccttcctgagggagatgcacttcgatatatgattgaaagaaccgtgaactggcagcacagagcccagcaactgctttcgtcagggaatcttaaatttgtgcaagatcgagtgggctcaggactgttatatagcagatggcaagcctcagcaggacaggtgtcagacacaaacaaggtatctcaacctcctggcacaacatcattttctttgcctgatgactgggacaacagaacctcatatttgcactcccccttctcaactggacgaagttgtatccccctccatggtgttagtccagaagtgaatgaactattgatggaagcccagctgctccaggtatcccttcctgaaattcaggaactttaccagactttacttgcaaagccaagccctgctcagcagactgaccgaagctcaccagtgagacccagcagtgagaagaatgactgttgccgagggaagcgagatggaattaacagtcttgagagaaaactgaagagacgcctggaaagagagggcctctccagtgagcggtgggaacgagttaagaaaatgcggacccccaaaaagaagaaaatcaaactgagccaccccaaggacatgaacaatttcaagttagagagagagcgtagctatgaattagttcgttctgctgaaactcattccctgccctcagacacatcctattccgaacaggaagactctgaggatgaagatgccatctgcccagctgtgagctgcctgcagccagaaggagatgaggtggactgggtccagtgtgatggcagctgcaatcagtggtttcatcaggtctgtgttggtgtctccccagagatggcagagaaagaagactacatctgtgtgcgctgtactgtgaaggacgcaccaagccgaaagtaaaaacacaaaaacagatacccccctacttaatgtaattcaggactccaaccaagaggatttcttcaaatctcagcaaagctacaggactggtactcaagccagcctgtaaacggtgctatttctattccttatgggatcatttttccaggactctttgaagaaaagaaaaaacaactaaaaaaatttttgacactttttgtattttttccttaagagctatttgtggttgttgaggtttgaaaagctgactgttttttttgcaggggttcccaccaatttggaaggcattgaagcttgcaccttttcatgtacagcattaaaattttacctctctctgggatttaccagcttaagagtccaactcacttccagtgcccaaaagggcacccaccagaaattccagtaaatcctcatttgaggaagctctcccttgtttactctgttaccacattggggaaatttttaagtttttcactttgggagtttttgtttgtttcttcttttcctttatccacttttcttcttcctggtagactaggtttatttatctgagcaataacttctatgttggtttcagtggctggaattaaaacaaaacaaaacaaacttccaaacagtgtgttggtgctttagcgattgattgatgtacagaacacaaatgtctagtttctagtgtcactgatgaactagtgatgtagaaaagagacttctctgtaagtaattgccacagctgtattttggctttctccctgtcccttcctttctcccctattttttggtagcttgtatcaaatgttacagtttatattgtggaataaatccttcgtcctaacataacactaaatgctgattatttagagccattagagcacagcttcttctgcccctctactgttgcacagccagaaggggctgcttgcttttgcctctgcccaaccaggttgcagtagcagtggatgttagcctgcaaacaacattaggggattcttcttttgtgtcctgctctgtttggtgggccatatgcctacagccctcactaacaaagaacccctctgtcttcaaggactagaacctatctttaaagccgtgctcttttaaaataagctttctcagaatgttggcaaatcacttcaatcctcaaatcagtcttccttgtggaatgctgcctttattatatttgaattgacaggggaacttggtttagggttaagacgttggaaggaaatctaaggaaaattaatcctcacagaggtccgggtttagtatatgtcttgagaggagacttgtgaattcccagactctgcctcctggtttcctttctcatttctttctaactgtagctatcattactggctgtggatagcccatagctattttccttgcttttcttttttaaaggggtctgttctgcagtggagaagacattctggtgaccagacttttgcttaccttttcctattctgttgccaatttttgttttccccacattctatagccataaacctgaagatgagtaaaactggtgggtctttaataaaacaacaacaaaaacagcagtttgtgatatagcagaggtttaaatgtaccctccccttttatgcacttcaaataattaaatctctttaagaatgaaaaaaaaaaaaaaaa

SEQ ID NO: 12 - DNA, 5173 bp, Homo sapiens
  misc_feature (589)..(589): n is a, c, g, or t
  misc_feature (1285)..(1286): n is a, c, g, or t
  misc_feature (1325)..(1325): n is a, c, g, or t
  misc_feature (1378)..(1378): n is a, c, g, or t
  misc_feature (1380)..(1380): n is a, c, g, or t
  misc_feature (2326)..(2326): n is a, c, g, or t
  misc_feature (2848)..(2848): n is a, c, g, or t
  misc_feature (2938)..(2938): n is a, c, g, or t
  misc_feature (3053)..(3053): n is a, c, g, or t
  misc_feature (4441)..(4444): n is a, c, g, or t
  misc_feature (5087)..(5089): n is a, c, g, or t
  misc_feature (5114)..(5122): n is a, c, g, or t
  misc_feature (5125)..(5132): n is a, c, g, or t
  misc_feature (5134)..(5134): n is a, c, g, or t
  misc_feature (5136)..(5139): n is a, c, g, or t
ggcggcggccgcggagtatcctggagctgcagacagtgcgggcctgcgcccagtcccggctgtcctcgccgcgacccctcctcagccctgggcgcgcgcacgctggggccccgcggggctggccgcctagcgagcctgccggtcgaccccagccagcgcagcgacggggcgctgcctggcccaggcgcacacggaagtgcgcttctctgaagtagctttggaaagtagagaagaaaatccagtttgcttcttggagaacactggacagctgaataaatgcagtatctaaatataaaagaggactgcaatgccatggctttctgtgctaaaatgaggagctccaagaagactgaggtgaacctggaggcccctgagccaggggtggaagtgatcttctatctgtcggacagggagcccctccggctgggcagtggagagtacacagcagaggaactgtgcatcagggctgcacaggcatgccgtatctctcctctttgtcacaacctctttgccctgtatgacgagaacaccaagctctggtatgctccaaatcgcaccatcaccgttgatgacaagatgtccctccggnctccactaccggatgaggttctatttcaccaattggcatggaaccaacgacaatgagcagtcagtgtggcgtcattctccaaagaagcagaaaaatggctacgagaaaaaaaagattccagatgcaacccctctccttgatgccagctcactggagtatctgtttgctcagggacagtatgatttggtgaaatgcctggctcctattcgagaccccaagaccgagcaggatggacatgatattgagaacgagtgtctagggatggctgtcctggccatctcacactatgccatgatgaagaagatgcagttgccagaactgcccaaggacatcagctacaagcgatatattccagaaacattgaataagtccatcagacagaggaaccttctcaccaggatgcggataaataatgttttcaaggatttcctaaaggaatttaacaacaagaccatttgtgacagcagcgtgtccacgcatgacctgaaggtgaaatacttggctaccttggaaactttgacaaaacattacggtgctgaaatatttgagacttccatgttactgatttcatcagaaaatgagatgaattggtttcattcgaatgacggtggaaacgttctctactacgaagtgatggtgactgggaatcttggaatccagtggaggcataaaccaaatgttgtttctgttgaaaannaaaaaaataaactgaagcggaaaaaactggaaaataaanacaagaaggatgaggagaaaaacaagatccgggaagagtggaacaatttttcntncttccctgaaatcactcacattgtaataaaggagtctgtggtcagcattaacaagcaggacaacaagaaaatggaactgaagctctcttcccacgaggaggccttgtcctttgtgtccctggtagatggctacttccggctcacagcagatgcccatcattacctctgcaccgacgtggcccccccgttgatcgtccacaacatacagaatggctgtcatggtccaatctgtacagaatacgccatcaataaattgcggcaagaaggaagcgaggaggggatgtacgtgctgaggtggagctgcaccgactttgacaacatcctcatgaccgtcacctgctttgagaagtctgagcaggtgcagggtgcccagaagcagttcaagaactttcagatcgaggtgcagaagggccgctacagtctgcacggttcggaccgcagcttccccagcttgggagacctcatgagccacctcaagaagcagatcctgcgcacggataacatcagcttcatgctaaaacgctgctgccagcccaagccccgagaaatctccaacctgctggtggctactaagaaagcccaggagtggcagcccgtctaccccatgagccagctgagtttcgatcggatcctcaagaaggatctggtgcagggcgagcaccttgggagaggcacgagaacacacatctattctgggaccctgatggattacaaggatgacgaaggaacttctgaagagaagaagataaaagtgatcctcaaagtcttagaccccagccacagggatatttccctggccttcttcgaggcagccagcatgatgagacaggtctcccacaaacacatcgtgtacctctatggcgtctgtgtccgcgacgtggagaatatcatggtggaagagtttgtggaagggggtcctctggatctcttcatgcaccggaaaagngatgtccttaccacaccatggaaattcaaagttgccaaacagctggccagtgccctgagctacttggaggataaagacctggtccatggaaatgtgtgtactaaaaacctcctcctggcccgtgagggcatcgacagtgagtgtggcccattcatcaagctcagtgaccccggcatccccattacggtgctgtctaggcaagaatgcattgaacgaatcccatggattgctcctgagtgtgttgaggactccaagaacctgagtgtggctgctgacaagtggagctttggaaccacgctctgggaaatctgctacaatggcgagatccccttgaaagacaagacgctgattgagaaagagagattctatgaaagccggtgcaggccagtgacaccatcatgtaaggagctggctgacctcatgacccgctgcatgaactatgaccccaatcagaggcctttcttccgagccatcatgagagacattaataagcttgaagagcagaatccagatattgtttcnagaaaaaaaaaccagccaactgaagtggaccccacacattttgaaaagcgcttcctaaagaggatccgtgacttgggagagggccacttntgggaaggttgagctctgcaggtatgaccccgaaggggacaatacaggggagcaggtggctgttaaatctctgaagcctgagagtggaggtaaccacatagctgatctgaaaaanggaaatcgagatcttaaggaacctctatcatgagaacattgtgaagtacaaaggaatctgcacagaagacggaggaaatggtattaagctcatcatggaatttctgccttcgggaagccttaaggaatatcttccaaagaataagaacaaaataaacctcaaacagcagctaaaatatgccgttcagatttgtaaggggatggactatttgggttctcggcaatacgttcaccgggacttggcagcaagaaatgtccttgttgagagtgaacaccaagtgaaaattggagacttcggtttaaccaaagcaattgaaaccgataaggagtattacaccgtcaaggatgaccgggacagccctgtgttttggtatgctccagaatgtttaatgcaatctaaattttatattgcctctgacgtctggtcttttggagtcactctgcatgagctgctgacttactgtgattcagattctagtcccatggctttgttcctgaaaatgataggcccaacccatggccagatgacagtcacaagacttgtgaatacgttaaaagaaggaaaacgcctgccgtgcccacctaactgtccagatgaggtttatcaacttatgaggaaatgctgggaattccaaccatccaatcggacaagctttcagaaccttattgaaggatttgaagcacttttaaaataagaagcatgaataacatttaaattccacagattatcaagtccttctcctgcaacaaatgcccaagtcattttttaaaaatttctaatgaaagaagtttgtgttctgtccaaaaagtcactgaactcatacttcagtacatatacatgtataaggcacactgtagtgcttaatatgtgtaaggacttcctctttaaatttggtaccagtaacttagtgacacataatgacaaccaaaatatttgaaagcacttaagcactcctccttgtggaaagaatataccaccatttcatctggctagttcaccatcacaactgcattaccaaaaggggatttttgaaaacgaggagttgaccaaaataatatctgaagatgattgcttttccctgctgccagctgatctgaaatgttttgctggcacattaatcatagataaagaaagattgatggacttagccctcaaatttcagtatctatacagtactagaccatgcattcttaaaatattagataccaggtagtatatattgtttctgtacaaaaatgactgtattctctcaccagtaggacttaaactttgtttctccagtggcttagctcctgttcctttgggtgatcactagcacccatttttgagaaagctggttctacatggggggatagctgtggaatagataatttgctgcatgttaattnnnnctcaagaactaagcctgtgccagtgctttcctaagcagtatacctttaatcagaactcattcccagaacctggatgctattacacatgcttttaagaaacgtcaatgtatatccttttataactctaccactttggggcaagctattccagcactggttttgaatgctgtatgcaaccagtctgaataccacatacgctgcactgttcttagagggtttccatacttaccaccgatctacaagggttgatccctgtttttaccatcaatcatcaccctgtggtgcaacacttgaaagacccggctagaggcactatggacttcaggatccactagacagttttcagtttgcttggaggtagctgggtaatcaaaaatgtttagtcattgattcaatgtgaacgattacggtctttatgaccaagagtctgaaaatctttttgttatgctgtttagtattcgtttgatattgttacttttcacctgttgagcccaaattcaggattggttcagtggcagcaatgaagttgccatttaaatttgttcatagcctacatcaccaaggtctctgtgtcaaacctgtggccactctatatgcactttgtttactctttatacaaataaatatactaaagactttaaannnaaaaaaaaaaaaaaaaaaaaaaaannnnnnnnnaannnnnnnnanannnngtcgtttaccccccctcactggccgtcgtttaac

SEQ ID NO: 13 - DNA, 4905 bp, Homo sapiens
  misc_feature (42)..(42): n is a, c, g, or t
  misc_feature (84)..(84): n is a, c, g, or t
  misc_feature (118)..(118): n is a, c, g, or t
  misc_feature (143)..(143): n is a, c, g, or t
  misc_feature (212)..(212): n is a, c, g, or t
  misc_feature (625)..(625): n is a, c, g, or t
  misc_feature (1134)..(1135): n is a, c, g, or t
  misc_feature (1138)..(1138): n is a, c, g, or t
  misc_feature (1299)..(1299): n is a, c, g, or t
  misc_feature (1337)..(1337): n is a, c, g, or t
  misc_feature (3243)..(3248): n is a, c, g, or t
  misc_feature (3250)..(3252): n is a, c, g, or t
  misc_feature (3697)..(3697): n is a, c, g, or t
  misc_feature (4639)..(4639): n is a, c, g, or t
  misc_feature (4641)..(4642): n is a, c, g, or t
  misc_feature (4644)..(4647): n is a, c, g, or t
  misc_feature (4649)..(4657): n is a, c, g, or t
gtgtcgctcgctttctgtcagcctctctccctctccctctcncctctccttcctctcgcttcctctctcgcacctgagcgtacncacctgcccgggcccggctccctcctcctctccnctccctctttccccgcccggccgcnggagcctcgtggctgcgtcaccgccgcccccccagacaagatggacaccgcggaggaagacatatgtangagtgtgtcggtcagaaggaacacctgagaaaccgctttatcatccttgtgtatgtactggcagtattaagtttatccatcaagaatgcttagttcaatggctgaaacacagtcgaaaagaatactgtgaattatgcaagcacagatttgcttttacaccaatttattctccagatatgccttcacggcttccaattcaagacatatttgctggactggttacaagtattggcactgcaatacgatattggtttcattatacacttgtggcctttgcatggttgggagttgttcctcttacagcatgccgcatctacaagtgcttgtttactggctccgtgagctcactactgacgctgccattagatatgctgtcaacggaaaatttgttggcagattgtttgcagggttgntttgtggtgacgtgcacactgtgtgcattcatcagcctggtgtggttgagagagcagatagtccatgggggagcaccaatttggttggagcatgctgccccaccgttcaatgctgcggggcatcaccaaaatgaggctccagcaggaggaaatggtgcagaaaatgttgctgctgatcagcctgctaacccaccagctgagaacgcagtggtgggggaaaaccctgatgcccaggatgaccaggcagaagaggaggaggaggacaatgaggaggaagatgacgctggtgtggaggatgcggcagatgctaataacggagcccaggatgacatgaattggaatgctttagaatgggaccgagctgctgaagagcttacatgggaaagaatgctaggacttgatggatcactagtttttctggaacatgtcttctgggtggtatctttaaatacactgttcattcttgtttttgcattttgcccttaccatattggtcatttctcccttgnnggnttgggatttgaagaacacgtccaagcatctcattttgaaggcctaatcacaaccatagttgggtatatacttttagcaataacactgataatttgtcatggcttggcaactcttgtgaaatttcatagatctcgtcgcttactgggagtctgctatattgntgttaaggtctctttgtgtagtggtggtagaaattggnagtattccctcctcatttggtgggttggtggctgggaatatctgttcccttggaaatgtttgatgctactctgaaagatcgagaactgagctttcagtcggctccaaggtactaccatgtttctgcattggctagtgggaatggtatatgtcttctactttgcctccttcattctactactgagagaggtacttcgacctggtgtcctgtggtttctaaggaatttgaatgatccagatttcaatccagtacaggaaatgatccatttgccaatatataggcatctccgaagatttattttgtcagtgattgtctttggctccattgtcctcctgatgctttggcttcctatacgtataattaagagtgtgctgcctaattttcttccatacaatgtcatgctctacagtgatgctccagtgagtgaactgtccctcgagctgcttctgcttcaggttgtcttgccagcattactcgaacagggacacacgaggcagtggctgaaggggctggtgcgagcgtggactgtgaccgccggatacttgctggatcttcattcttatttattgggagaccaggaagaaaatgaaaacagtgcaaatcaacaagttaacaataatcagcatgctcgaaataacaacgctattcctgtggtgggagaaggccttcatgcagcccaccaagccatactccagcagggagggcctgttggctttcagccttaccgccgacctttaaattttccactcaggatatttctgttgattgtcttcatgtgtataacattactgattgccagcctcatctgccttactttaccagtatttgctggccgttggttaatgtcgttttggacggggactgccaaaatccatgagctctacacagctgcttgtggtctctatgtttgctggctaaccataagggctgtgacggtgatggtggcatggatgcctcagggacgcagagtgatcttccagaaggttaaagagtggtctctcatgatcatgaagactttgatagttgcggtgctgttggctggagttgtccctctccttctggggctcctgtttgagctggtcattgtggctcccctgagggttcccttggatcagactcctcttttttatccatggcaggactgggcacttggagtcctgcatgccaaaatcattgcagctataacattgatgggtcctcagtggtggttgaaaactgtaattgaacaggtttacgcaaatggcatccggaacattgaccttcactatattgttcgtaaactggcagctcccgtgatctctgtgctgttgctttccctgtgtgtaccttatgtcatagcttctggtgttgttcctttactaggtgttactgcggaaatgcaaaacttagtccatcggcggatttatccatttttactgatggtcgtggtattgatggcaattttgtccttccaagtccgccagtttaagcgcctttatgaacatattaaaaatgacaagtaccttgtgggtcaacgactcgtgaactacgaacggaaatctggcaaacaaggctcatctccaccacctccacagtcatcccaagaataaagtagttgtctcaacaacttgaccttcccctttacatgtccttttttgtggacttctctctttggagatttttcccagtgatctctcagcgttgtttttaagttaaatgtatttgacttgtgttctcagcattcagagagcagcggtgtaagattctgctgttctccctggatcttctgacattactgctgtctgagatttgtatatgtgtaaatacaagttccttgataccctaaaaccttggattaaacagaatgtgcattgtacatctttaaacaaaatgtatattaatttattaaatctagttgtcactttannnnnnannngctgtgatctcgacaggaaacgtgccacagagcagtagtgcgcaggcaagacttttcagtgacgccttgtggaacgcagttcatgatgtcctagcagctctcactaagggaactgtacattctttctttcttggctattcagaccttaccaagaacgttaaaggaaacaagtagaaatcagcagtggagtgtctgtggtaagaaaacatgaactttatgcttcactgttagttgtttgtggaagttattttgtataacaccaaagctgttgtacatttcctactgcctgatttttttcatgtgtctgtgtttgtaatattgtatagtatcttgtgctaggtgaggaaattattttttaattttgataatttaatattcctagtgtgatcagcattgggagttgggtttcagtggggcatgtctatacttagagaaaaaaagtccnaatgaagattttcatgagtcagcccccccgcccgcccccaccccacacccacatcctctcttttccacacacaactatctgtttattttttgtagcagtggccgaaagtcctgcaaggtcataaatctttcagagtgacatcaccaactgtactgcatcttactggatttaggacttctgagatgcttgtgaagtatagatgtggttgtggtcttagattgacagcattagagaagactggttagaacatctggtctcgctggttagtgcctcgttggctgaggactaggtgtgcatttctcctagcttttcatcaggaaatcccaaagtttccaaagctttttgtttacagaataaaacttcaaataaaaccaattcattatttgtccagaaggaagcttggctgagctggccttttaacataggaatgtatttcgttggaaacattctgaaaaatctcagagaactgaacccttacaaactttgttttccctcataaccaaagcttcaggttagaagtttagaaaaatagaatggttgggtacatgatctaaatgtttaatgctaaaggtatatcgtaagggtagtgtttgtttttgaacgataatttagaagttctcatagaaagcgtataacataggtcttcagaaactataaaagaattttcatatagtattaaaatccatagactaaaatctgagaattttttaacatatgcaagtcagccaaacataagctaccaaaataaagagcaatgtgttctggctgttttatacttcaacaattttttccctaagtggtaagcaattactttaaaacatatttttaaaaacatcggtatcgggagctgcggtggctccggccggttgtcctggcacacaaggaggcgaggctatgcgttcgaggccaacctaggcaaaattggaaaaaaaaaaaaaaaanannannnnannnnnnnnntgacataggattcagtgttatactctttggcactttagagcagccttttctctcatttgaaataaggtctttgttagccctacctttactcagaaatttagtcctactataaaaaattaggattttaaaatataatgctgcctgtcatagtgtatttctaaattgctctctttgggagaaaaacattattattgaattgagcatataactatataactatatatatatatatatataactatatatat

SEQ ID NO: 14 - DNA, 4611 bp, Homo sapiens
gtgtcgctcgctttctgtcagcctctctccctctccctctcccctctccttcctctcgcttcctctctcgcacctgagcgtacgcacctgcccgggcccggctccctcctcctctcccctccctctttccccgcccggccgcgggagcctcgtggctgcgtcaccgccgcccccccagacaagatggacaccgcggaggaagacatatgtagagtgtgtcggtcagaaggaacacctgagaaaccgctttatcatccttgtgtatgtactggcagtattaagtttatccatcaagaatgcttagttcaatggctgaaacacagtcgaaaagaatactgtgaattatgcaagcacagatttgcttttacaccaatttattctccagatatgccttcacggcttccaattcaagacatatttgctggactggttacaagtattggcactgcaatacgatattggtttcattatacacttgtggcctttgcatggttgggagttgttcctcttacagcatgccgcatctacaagtgcttgtttactggctccgtgagctcactactgacgctgccattagatatgctgtcaacggaaaatttgttggcagattgtttgcagggttgttttgtggtgacgtgcacactgtgtgcattcatcagcctggtgtggttgagagagcagatagtccatgggggagcaccaatttggttggagcatgctgccccaccgttcaatgctgcggggcatcaccaaaatgaggctccagcaggaggaaatggtgcagaaaatgttgctgctgatcagcctgctaacccaccagctgagaacgcagtggtgggggaaaaccctgatgcccaggatgaccaggcagaagaggaggaggaggacaatgaggaggaagatgacgctggtgtggaggatgcggcagatgctaataacggagcccaggatgacatgaattggaatgctttagaatgggaccgagctgctgaagagcttacatgggaaagaatgctaggacttgatggatcactagtttttctggaacatgtcttctgggtggtatctttaaatacactgttcattcttgtttttgcattttgcccttaccatattggtcatttctcccttgttggtttgggatttgaagaacacgtccaagcatctcattttgaaggcctaatcacaaccatagttgggtatatacttttagcaataacactgataatttgtcatggcttggcaactcttgtgaaatttcatagatctcgtcgcttactgggagtctgctatattgttgttaaggtctctttgttagtggtggtagaaattggagtattccctctcatttgtggttggtggctggatatctgttccttggaaatgtttgatgctactctgaaagatcgagaactgagctttcagtcggctccaggtactaccatgtttctgcattggctagtgggaatggtatatgtcttctactttgcctccttcattctactactgagagaggtacttcgacctggtgtcctgtggtttctaaggaatttgaatgatccagatttcaatccagtacaggaaatgatccatttgccaatatataggcatctccgaagatttattttgtcagtgattgtctttggctccattgtcctcctgatgctttggcttcctatacgtataattaagagtgtgctgcctaattttcttccatacaatgtcatgctctacagtgatgctccagtgagtgaactgtccctcgagctgcttctgcttcaggttgtcttgccagcattactcgaacagggacacacgaggcagtggctgaaggggctggtgcgagcgtggactgtgaccgccggatacttgctggatcttcattcttatttattgggagaccaggaagaaaatgaaaacagtgcaaatcaacaagttaacaataatcagcatgctcgaaataacaacgctattcctgtggtgggagaaggccttcatgcagcccaccaagccatactccagcagggagggcctgttggctttcagccttaccgccgacctttaaattttccactcaggatatttctgttgattgtcttcatgtgtataacattactgattgccagcctcatctgccttactttaccagtatttgctggccgttggttaatgtcgttttggacggggactgccaaaatccatgagctctacacagctgcttgtggtctctatgtttgctggctaaccataagggctgtgacggtgatggtggcatggatgcctcagggacgcagagtgatcttccagaaggttaaagagtggtctctcatgatcatgaagactttgatagttgcggtgctgttggctggagttgtccctctccttctggggctcctgtttgagctggtcattgtggctcccctgagggttcccttggatcagactcctcttttttatccatggcaggactgggcacttggagtcctgcatgccaaaatcattgcagctataacattgatgggtcctcagtggtggttgaaaactgtaattgaacaggtttacgcaaatggcatccggaacattgaccttcactatattgttcgtaaactggcagctcccgtgatctctgtgctgttgctttccctgtgtgtaccttatgtcatagcttctggtgttgttcctttactaggtgttactgcggaaatgcaaaacttagtccatcggcggatttatccatttttactgatggtcgtggtattgatggcaattttgtccttccaagtccgccagtttaagcgcctttatgaacatattaaaaatgacaagtaccttgtgggtcaacgactcgtgaactacgaacggaaatctggcaaacaaggctcatctccaccacctccacagtcatcccaagaataaagtagttgtctcaacaacttgaccttcccctttacatgtccttttttgtggacttctctctttggagatttttcccagtgatctctcagcgttgtttttaagttaaatgtatttgacttgtgttctcagcattcagagagcagcggtgtaagattctgctgttctccctggatcttctgacattactgctgtctgagatttgtatatgtgtaaatacaagttccttgataccctaaaaccttggattaaacagaatgtgcattgtacatctttaaacaaaatgtatattaatttattaaatctagttgtcactttattttggacctgctgtgatctcgacaggaaacgtgccacagagcagtagtgcgcaggcaagacttttcagtgacgccttgtggaacgcagttcatgatgtcctagcagctctcactaagggaactgtacattctttctttcttggctattcagaccttaccaagaacgttaaaggaaacaagtagaaatcagcagtggagtgtctgtggtaagaaaacatgaactttatgcttcactgttagttgtttgtggaagttattttgtataacaccaaagctgttgtacatttcctactgcctgatttttttcatgtgtctgtgtttgtaatattgtatagtatcttgtgctaggtgaggaaattatttttaattttgataatttaatattcctagtgtgatcagcattgggagttgggtttcagtggggcatgtctatacttagagaaaaaaagtccaaatgaagattttcatgagtcagcccccccgcccgcccccaccccacacccacatcctctcttttccacacacaactatctgtttattttttgtagcagtggccgaaagtcctgcaaggtcataaatctttcagagtgacatcaccaactgtactgcatcttactggatttaggacttctgagatgcttgtgaagtatagatgtggttgtggtcttagattgacagcattagagaagactggttagaacatctggtctcgctggttagtgcctcgttggctgaggactaggtgtgcatttctcctagcttttcatcaggaaatcccaaagtttccaaagctttttgtttacagaataaaacttcaaataaaaccaattcattatttgtccagaaggaagcttggctgagctggccttttaacataggaatgtatttcgttggaaacattctgaaaaatctcagagaactgaacccttacaaactttgttttccctcataaccaaagcttcaggttagaagtttagaaaaatagaatggttgggtacatgatctaaatgtttaatgctaaaggtatatcgtaagggtagtgtttgtttttgaacgataatttagaagttctcatagaaagcgtataacataggtcttcagaaactataaaagaattttcatatagtattaaaatccatagactaaaatctgagaattttttaacatatgcaagtcagccaaacataagctaccaaaataaagagcaatgtgttctggctgttttatacttcaacaattttttccctaagtggtaagcaattactttaaaacatatttttaaaaacatcggtatcgggagctgcggtggctccggccggttgtcctggcacacaaggaggcgaggctatgcgttcgaggccaacctaggcaaaattgg

SEQ ID NO: 15 - DNA, 2301 bp, Homo sapiens
tcgacagctctctcgcccagcccagttctggaagggataaaaagggggcatcaccgttcctgggtaacagagccaccttctgcgtcctgctgagctctgttctctccagcacctcccaacccactagtgcctggttctcttgctccaccaggaacaagccaccatgtctcgccagtcaagtgtgtccttccggagcgggggcagtcgtagcttcagcaccgcctctgccatcaccccgtctgtctcccgcaccagcttcacctccgtgtcccggtccgggggtggcggtggtggtggcttcggcagggtcagccttgcgggtgcttgtggagtgggtggctatggcagccggagcctctacaacctggggggctccaagaggatatccatcagcactagaggaggcagcttcaggaaccggtttggtgctggtgctggaggcggctatggctttggaggtggtgccggtagtggatttggtttcggcggtggagctggtggtggctttgggctcggtggcggagctggctttggaggtggcttcggtggccctggctttcctgtctgccctcctggaggtatccaagaggtcactgtcaaccagagtctcctgactcccctcaacctgcaaatcgaccccagcatccagagggtgaggaccgaggagcgcgagcagatcaagaccctcaacaataagtttgcctccttcatcgacaaggtgcggttcctggagcagcagaacaaggttctggacaccaagtggaccctgctgcaggagcagggcaccaagactgtgaggcagaacctggagccgttgttcgagcagtacatcaacaacctcaggaggcagctggacagcatcgtgggggaacggggccgcctggactcagagctgagaaacatgcaggacctggtggaagacttcaagaacaagtatgaggatgaaatcaacaagcgtaccactgctgagaatgagtttgtgatgctgaagaaggatgtagatgctgcctacatgaacaaggtggagctggaggccaaggttgatgcactgatggatgagattaacttcatgaagatgttctttgatgcggagctgtcccagatgcagacgcatgtctctgacacctcagtggtcctctccatggacaacaaccgcaacctggacctggatagcatcatcgctgaggtcaaggcccagtatgaggagattgccaaccgcagccggacagaagccgagtcctggtatcagaccaagtatgaggagctgcagcagacagctggccggcatggcgatgacctccgcaacaccaagcatgagatcacagagatgaaccggatgatccagaggctgagagccgagattgacaatgtcaagaaacagtgcgccaatctgcagaacgccattgcggatgccgagcagcgtggggagctggccctcaaggatgccaggaacaagctggccgagctggaggaggccctgcagaaggccaagcaggacatggcccggctgctgcgtgagtaccaggagctcatgaacaccaagctggccctggacgtggagatcgccacttaccgcaagctgctggagggcgaggaatgcagactcagtggagaaggagttggaccagtcaacatctctgttgtcacaagcagtgtttcctctggatatggcagtggcagtggctatggcggtggcctcggtggaggtcttggcggcggcctcggtggaggtcttgccggaggtagcagtggaagctactactccagcagcagtgggggtgtcggcctaggtggtgggctcagtgtggggggctctggcttcagtgcaagcagtggccgagggctgggggtgggctttggcagtggcgggggtagcagctccagcgtcaaatttgtctccaccacctcctcctcccggaagagcttcaagagctaagaacctgctgcaagtcactgccttccaagtgcagcaacccagcccatggagattgcctcttctaggcagttgctcaagccatgttttatccttttctggagagtagtctagaccaagccaattgcagaaccacattctttggttcccaggagagccccattcccagcccctggtctcccgtgccgcagttctatattctgcttcaaatcagccttcaggtttcccacagcatggcccctgctgacacgagaacccaaagttttcccaaatctaaatcatcaaaacagaatccccaccccaatcccaaattttgttttggttctaactacctccagaatgtgttcaataaaatgcttttataatat

SEQ ID NO: 16 - DNA, 2757 bp, Homo sapiens
  misc_feature (17)..(18): n is a, c, g, or t
  misc_feature (20)..(20): n is a, c, g, or t
  misc_feature (22)..(29): n is a, c, g, or t
  misc_feature (37)..(37): n is a, c, g, or t
  misc_feature (70)..(70): n is a, c, g, or t
  misc_feature (74)..(74): n is a, c, g, or t
  misc_feature (83)..(85): n is a, c, g, or t
  misc_feature (87)..(89): n is a, c, g, or t
  misc_feature (91)..(91): n is a, c, g, or t
  misc_feature (126)..(126): n is a, c, g, or t
  misc_feature (2102)..(2102): n is a, c, g, or t
  misc_feature (2104)..(2109): n is a, c, g, or t
  misc_feature (2111)..(2111): n is a, c, g, or t
  misc_feature (2113)..(2122): n is a, c, g, or t
  misc_feature (2189)..(2190): n is a, c, g, or t
  misc_feature (2740)..(2743): n is a, c, g, or t
ctagtattctactaganntngnnnnnnnnagacccanggggctgccctcccctgcgcactcccctcgctncccnggcccggannncnnngnggccgcacaggtatttttgctgtgctgtgcaaggnaactctgctagctcaagattcacaatgttgaaagcccttttcctaactatgctgactctggcgctggtcaagtcacaggacaccgaagaaaccatcacgtacacgcaatgcactgacggatatgagtgggatcctgtgagacagcaatgcaaagatattgatgaatgtgacattgtcccagacgcttgtaaaggtggaatgaagtgtgtcaaccactatggaggatacctctgccttccgaaaacagcccagattattgtcaataatgaacagcctcagcaggaaacacaaccagcagaaggaacctcaggggcaaccaccggggttgtagctgccagcagcatggcaaccagtggagtgttgcccgggggtggttttgtggccagtgctgctgcagtcgcaggccctgaaatgcagactggccgaaataactttgtcatccggcggaacccagctgaccctcagcgcattccctccaacccttcccaccgtatccagtgtgcagcaggctacgagcaaagtgaacacaacgtgtgccaagacatagacgagtgcactgcagggacgcacaactgtagagcagaccaagtgtgcatcaatttacggggatcctttgcatgtcagtgccctcctggatatcagaagcgaggggagcagtgcgtagacatagatgaatgtaccatccctccatattgccaccaaagatgcgtgaatacaccaggctcattttattgccagtgcagtcctgggtttcaattggcagcaaacaactatacctgcgtagatataaatgaatgtgatgccagcaatcaatgtgctcagcagtgctacaacattcttggttcattcatctgtcagtgcaatcaaggatatgagctaagcagtgacaggctcaactgtgaagacattgatgaatgcagaacctcaagctacctgtgtcaatatcaatgtgtcaatgaacctgggaaattctcatgtatgtgcccccagggataccaagtggtgagaagtagaacatgtcaagatataaatgagtgtgagaccacaaatgaatgccgggaggatgaaatgtgttggaattatcatggcggcttccgttgttatccacgaaatccttgtcaagatccctacattctaacaccagagaaccgatgtgtttgcccagtctcaaatgccatgtgccgagaactgccccagtcaatagtctacaaatacatgagcatccgatctgataggtctgtgccatcagacatcttccagatacaggccacaactatttatgccaacaccatcaatacttttcggattaaatctggaaatgaaaatggagagttctacctacgacaaacaagtcctgtaagtgcaatgcttgtgctcgtgaagtcattatcaggaccaagagaacatatcgtggacctggagatgctgacagtcagcagtatagggaccttccgcacaagctctgtgttaagattgacaataatagtggggccattttcattttagtcttttctaagagtcaaccacaggcatttaagtcagccaaagaatattgttaccttaaagcactattttatttatagatatatctagtgcatctacatctctatactgtacactcacccataattcaaacaattacaccatggtataaagtgggcatttaatatgtaaagattcaaagtttgtctttattactatatgtaaattagacattaatccactaaactggtcttcttcaagagagctaagtatacactatctggtgaaacttggattctttcctataaaagtgggaccaagcaatgatgatcttctgtggtgcttaaggaaacttactagagctccactaacagtctcataaggaggcagccatcataaccattgaatagcatgcaagggtaagaatgagtttttaactgctttgtaagaaaatggaaaaggtcaataaagatatatttctttagaaaatgggnannnnnnanannnnnnnnnntttttattttcatatccagcctaaaggtggttgtttattatatagtaataaatcattgctgtacaannatgctggtttctgtagggtatttttaattttgtcagaaattttagattgtgaatattttgtaaaaaacagtaagcaaaattttccagaattcccaaaatgaaccagatatcccctagaaaattatactattgagaaatctatggggaggatatgagaaaataaattccttctaaaccacattggaactgacctgaagaagcaaactcggaaaatataataacatccctgaattcaggacttccacaagatgcagaacaaaatggataaaaggtatttcactggagaagttttaatttctaagtaaaatttaaatcctaacacttcactaatttataactaaaatttctcatcttcgtacttgatgctcacagaggaagaaaatgatgatggtttttattcctggcatccagagtgacagtgaacttaagcaaattaccctcctacccaattctatggaatattttatacgtctccttgtttaaaatgtcactgctttactttgatgtatcatatttttaaataaaaataaatattcctttagaagatcannnnaaaaaaaaaaaaaa

SEQ ID NO: 17 - DNA, 3297 bp, Homo sapiens
tgccggcgctctctgcgtggttcttcttctcggccgctgaaacccccgcggctgcttcctgggaaggtcgtgagtcccgctgagctgtccccggtgccgccgacccgggccgtgtgcccgtggctccagccgctgccgcctcgatctcctcgtctcccgctccgccctcccttttccctggatgaacttgcgtcctttctcttctccgccatggaattctgctccgtgcttttagccctcctgagccaaagaaaccccagacaacagatgcccatacgcagcgtatagcagtaactccccagctcggtttctgtgccgtagtttacagtatttaattttatataatatatattatttattatagcatttttgatacctcatattctgtttacacatcttgaaaggcgctcagtagttctcttactaaacaaccactactccagagaatggcaacgctgattaccagtactacagctgctaccgccgcttctggtcctttggtggactacctatggatgctcatcctgggcttcattattgcatttgtcttggcattctccgtgggagccaatgatgtagcaaattcttttggtacagctgtgggctcaggtgtagtgaccctgaagcaagcctgcatcctagctagcatctttgaaacagtgggctctgtcttactgggggccaaagtgagcgaaaccatccggaagggcttgattgacgtggagatgtacaactcgactcaagggctactgatggccggctcagtcagtgctatgtttggttctgctgtgtggcaactcgtggcttcgtttttgaagctccctatttctggaacccattgtattgttggtgcaactattggtttctccctcgtggcaaaggggcaggagggtgtcaagtggtctgaactgataaaaattgtgatgtcttggttcgtgtccccactgctttctggaattatgtctggaattttattcttcctggttcgtgcattcatcctccataaggcagatccagttcctaatggtttgcgagctttgccagttttctatgcctgcacagttggaataaacctcttttccatcatgtatactggagcaccgttgctgggctttgacaaacttcctctgtggggtaccatcctcatctcggtgggatgtgcagttttctgtgcccttatcgtctggttctttgtatgtcccaggatgaagagaaaaattgaacgagaaataaagtgtagtccttctgaaagccccttaatggaaaaaaagaatagcttgaaagaagaccatgaagaaacaaagttgtctgttggtgatattgaaaacaagcatcctgtttctgaggtagggcctgccactgtgcccctccaggctgtggtggaggagagaacagtctcattcaaacttggagatttggaggaagctccagagagagagaggcttcccagcgtggacttgaaagaggaaaccagcatagatagcaccgtgaatggtgcagtgcagttgcctaatgggaaccttgtccagttcagtcaagccgtcagcaaccaaataaactccagtggccactaccagtatcacaccgtgcataaggattccggcctgtacaaagagctactccataaattacatcttgccaaggtgggagattgcatgggagactccggtgacaaacccttaaggcgcaataatagctatacttcctataccatggcaatatgtggcatgcctctggattcattccgtgccaaagaaggtgaacagaagggcgaagaaatggagaagctgacatggcctaatgcagactccaagaagcgaattcgaatggacagttacaccagttactgcaatgctgtgtctgaccttcactcagcatctgagatagacatgagtgtcaaggcagagatgggtctaggtgacagaaaaggaagtaatggctctctagaagaatggtatgaccaggataagcctgaagtctctctcctcttccagttcctgcagatccttacagcctgctttgggtcattcgcccatggtggcaatgacgtaagcaatgccattgggcctctggttgctttatatttggtttatgacacaggagatgtttcttcaaaagtggcaacaccaatatggcttctactctatggtggtgttggtatctgtgttggtctgtgggtttggggaagaagagttatccagaccatggggaaggatctgacaccgatcacaccctctagtggcttcagtattgaactggcatctgccctcactgtggtgattgcatcaaatattggccttcccatcagtacaacacattgtaaagtgggctctgttgtgtctgttggctggctccggtccaagaaggctgttgactggcgtctctttcgtaacatttttatggcctggtttgtcacagtccccatttctggagttatcagtgctgccatcatggcaatcttcagatatgtcatcctcagaatgtgaagctgtttgagattaaaatttgtgtcaatgtttgggaccatcttaggtattcctgctcccctgaagaatgattacagtgttaacagaagactgacaagagtctttttatttgggagccagaggagggaagtgttacttgtgctataactgcttttgtgctaaatatgaattgtctcaaaattagctgtgtaaaatagcccgggttcctttggctcctgctgaggtcccctttccttctgggctgtgaattcctgtacatatttctctactttttgtatcaggcttcaattccattatgttttaatgttgtctctgaagatgacttgtgatttttttttcttttttttaaaccatgaagagccgtttgacagagcatgctctgcgttgttggtttcaccagcttctgccctcacatgcacagggatttaacaacaaaaatataactacaacttcccttgtagtctcttatataagtagagtccttggtactctgccctcctgtcagtagtggcaggatctattggcatattcgggagcttcttagagggatgaggttctttgaacacagtgaaaatttaaattagtaacttttttgcaagcagtttattgactgttattgctaagaagaagtaagaaagaaaaagcctgttggcaatcttggttatttctttaagatttctggcagtgtgggatggatgaatgaagtggaatgtgaacttcgggcaagttaaatgggacagccttccatgttcatttgtctacctcttaactgaataaaaaagcctacagtttttagaaaaaaaaaaaaaaa

SEQ ID NO: 18 - DNA, 11102 bp, Homo sapiens
ggcgggaggagtaaagatggcggcgcgagggtctccgccctctgctccgggctgaagcgctctgagagaggcggcagcggcaactcgagccccaacagtaatttagtgttggtagttttggcagcagctgccgaggccggagcaatggcggaactggagcacctaggagggaagcgggcagagtcggcgcgaatgcggcgggcagagcagcttcggcgctggcggggctcgctgacagagcaggagcctgcggagcgacgaggcgcggggcggcagccgctgaccaggcgcgggagccccagggtccgcttcgaggacggtgctgtctttctggccgcctgctctagcggggacaccgacgaggtgagaaagcttctggcaagaggtgctgatatcaacacggtcaacgtggacggcttgacagccctgcaccaggcatgtattgatgaaaatttggacatggtgaagtttctggtggagaacagagccaatgtaaaccagcaagacaacgagggctggacaccccttcatgcagcagcttcctgtggctatctcaacatagcagagtatttcattaatcacggagccagtgtaggtattgtcaatagtgaaggtgaagttccctctgaccttgcagaagagccagccatgaaggatcttcttctggagcaagtaaagaagcaaggaattgatctagagcagtcaagaaaagaagaagagcagcagatgttgcaggatgcccgccagtggctcaacagtgggaaaatagaggatgtgaggcaggctcgctcaggggctacagcccttcatgtggctgctgccaagggctactctgaagtcctcagacttttaattcaggctggctatgaactcaatgttcaggattatgatggctggactcccctccatgctgctgcacactggggagtgaaggaggcttgctccatcctggcagaagcactttgtgacatggatattcgaaataaactgggccagacaccatttgatgtggctgatgagggtctcgtggagcatttggagttgctccagaagaagcagaatgtgcttcgaagtgaaaaggagacacggaataaactcattgagtcagatctgaacagcaagattcagagtgggttctttaagaacaaagagaagatgctctatgaggaggagacacctaagtcccaagaaatggaggaagaaaataaagaatctagtagctccagctcagaggaggaggaaggtgaagatgaagcttctgagtcagaaactgagaaggaggcagataaaaagccagaagcctttgtcaatcattccaactctgaaagcaagagtagtatcacagagcagataccagcaccagctcaaaataccttctctgcctcttctgctaggaggttctcttctggcctttttaacaagccagaagagcccaaagatgaatctccttcttcatggagattgggactgagaaaaactggcagccacaacatgctgagtgaggtggccaattccagggaacctataagggaccgaggctcttccatctatcgctcctcttcaagccctcgaatttctgctctactggacaacaaagataaggagagagaaaacaaaagctatattagttcactagcaccccggaagctcaacagcacaagtgatattgaagaaaaggagaacagagaatcagctgttaatctagtgaggagtggctcctatacccggcagctatggagggatgaagcaaaaggaaatgaaatcccacagacaattgctccctccacctatgtatcaacttacttgaaaaggactcctcacaaatcccaggccgacacaacagcagagaaaacagcagacaatgtctcttctagcaccccgctctgtgtgatcaccaatcgccctcttcctagcactgccaatggggttacagctactcctgtgctctccattactggaacagattcctctgtggaagccagggagaagaggaggtcctatctgactcctgtacgggatgaggaagcagagtctttacggaaagcacgctccagacaagctcggcagacacgaaggtctactcaaggtgtcaccctaacagaccttcaagaagcagaaaggacattcagccggtcgagggcagagaggcaagctcaggagcagcctcgtgagaagcccacagacactgaagggcttgaggggagccctgagaagcatgagccctcagcagttccagcaacagaagctggggagggccagcagccctggggcaggagtctggatgaagagcctatctgtcatcgcctgaggtgcccagctcagccagacaaacccaccacgccagcatctccttctacgtcaagaccctcactctacaccagttcccacctgctatggacaaatagattttcagtccctgattctgagagttcagagactaccacaaacactacaactgcaaaggaaatggacaaaaatgagaatgaagaagcagatttggatgagcagtcctctaagaggctgtccatccgagagaggaggcggcccaaggaacgacgaagaggcacaggcatcaatttctggacaaaggatgaggatgaaactgatggctctgaagaggtcaaagaaacgtggcatgaaagactttctaggttggaatcgggaggtagtaatcctacaaccagtgattcttacggtgaccgggcttcagcaagagcccgtcgggaggcccgggaggcccgcctagccaccctgaccagccgtgtagaagaagacagcaacagagattataaaaaactctatgagagtgctctgactgaaaaccaaaaactgaaaacaaaacttcaggaagcccagctagagctagcagatataaagtccaagcttgagaaggtggcccagcagaaacaagaaaagacctctgaccgatcatcagtgctggagatggagaaacgggagaggcgagccttggagcgcaaaatgtcagaaatggaggaagaaatgaaggtgttaacagaactgaaatccgacaaccagaggctgaaagatgaaaatggtgccctcatcagagtcatcagcaaactgtccaagtaggctaggctccagatttatgaggaaagaaagggacagcatttgctgcccccacccctcttttccagtccttgccttccaaccaaaagaaatggatgttttggtggaaggacacttctttctatcaccctctttagtcacctctatacactctacattttctctgcactttcaatgccctgttcttccaaacccctatcccaagttttatgacagttttaattgaagcatgattgtggtaattcgagccatctggagaatgctctggggagtacaccaggctcagctgtggacccctcaacttcctgctgctcagctactttgtccacattggatttggtccaaacatgtaagacttctaccctaatcagtatccttcagctttttacattaacccagtgtcctctgatataggtgagtcttgtggtagccactccaggatcctgattggggtgccaagagaaacagcaggatgttgaattgatcatcagatgccctctggaatggttagcatccaaggtgacagtgactgcattgaggcgctctattcttcttcacctctcaggaactgacttttattttttctrtcaacacccagtaatctccctaactagttttaacccttattcctccctcatacctagccatttctccaaggcgcaaatggccctggcttcatttattcctttcctttctatccttttatatttttcccttccccaccccctcactcaatggtataaaagctaggacagagcacctgacctcagttgtctttggccattgtgggaagtcattattctggagacaagaaaatcatcactctggtgccttggtggcagcaccactgcctgctccctggaaggtagactatggcataagtgtcagctcattgttttcgtctcccacttatcttcccccttcaaagtgattttctttataagaaaatttgggctctgaatactccattctgcctcacttccttgaccttgttttcctctcttcgccctgacacctgcttctaatgagaaatgaagtcagtgcaaggaggaatgagaggtggggaggggagattgttgagagatggactaggaagtggaagcaggctggaaagacacatatggcgaaagtcaagtatctgaggccacttgcaacattgtgacaaagaagatggaagatagcagcctactgggctgtgagaatagtggtgaatttgattatttccagtggttagatttagcagagagatttactttcttagaaattaataggggaaatggcacttaatagaggtttaatggaatgaagtactttcaacccattgatgagagtcatggaagtttagagtggcaagacccagaggtcattaggtccagctttctattattgtgtcacagggacccctgctaccacagctttcacccatgggcatggtcaggtagcctctggtggctatgcatttattactcaaaagttgggcaactctaataacgagagagtttttcctcatatcagctgaagtctgcctgtggattctccttgtagtccagatctactatctgcaactctttaacggcacttgagatatgtgcagtgggtggtctccccctcagtcttactttgagctgctgttactctagtcctttaagtcattcctcatatggcatgcttttcttacctgtcacatcttggccatcctcctctagacaaaaccagcctttaaaatatcatgtccaggcctggaaagaatacaaatccagtgcaaaattaaaccattagttcttgatgataacctagcattaatacttacagtattttctttttgtaggagttttatcccttggttcacttgagtgtgcaagtcattaaatcctcatcattttagggttgccagtgatattcagtgtttagagtggttcattcccttaatatatactacctctgtctgttaattctttcctaacatgacatgtagctctccatggtcctccctctgaaacaccacatgctgtttaaactagaagctgtaattcaagatcccaattccaccaggtgcagtggctcatgcctgtaatcccagcacttcaggaggccgaggtggacagatcacgaggtcaggagttcgagaccatcctggctaacacggtgaaacccaatctctactaaaaatacaaaaaattagccaggcgtggtggcaggcgcctgtagtcccagctactcaggaggctgaggcaggagaatggcgtgaacccgggaggcggagcttgcagtgagccttgatcacgccactgcactccagcctgggtgacagagcaagactccatctcaaaaaaaataataataataaataaataaaaaatcccaattacagaacaggagatatgtttcctctgacaaaaccccatttttagagtgtataaaattctgtctttcatttccaaccatttttcaagagaagctgctactatcttgagacttcgtattatcatgggagtactgtaagttcagttctcagggaatgctaaattagagtaataagttttatatccttcattctgggagaggaaatcaacataaggtgttgactaattgattatcctggaacattttgaatattggggaaggaagatgatacttctttctcaagaaaagaaaattggattattaggaatacatcttgacccttttccactcaatagaccagggaaaggggttacagagagcctcctcagatctgtttgtgcctttcaaaagtactgggggcagattctcaaaactcttagattggtgttgcatccctgccacttcacatgacccttccatgttaaagctgacttttcttgccagaaagttttccttgtgacaagaaatttgcaagcttttcaatctcaggaatactggattctatagccaagaactcatgaaagtaagtgtaaactatcctaggtaatttcaggtactttctcttatgcaattaattttattaactgatttctggtctatctccagagataaaataccattccttcacaactgtattgtctggaagccccatgagatggtaattataggccttctactagccagcagttctctctggatactggcatcagcaggtctcctttttcttgtgctgcttggacaggtacctactgctggcctcttcagtggccacaatcctcagtcctcacctgctggtttggagactcatgagcaccccaggcagctcaagctgaataaatagctgcagacatggccaacaacatggggctcaggtctgtcacttaacttagagtctttacatgaaatatcagaatgggaaagagaatgttcctggtaaaactctgttttcattaatttgttatttttcaaaaaccgagccacacctttggaagtaatgatttggccattccagagattctggggctaaagtttgtttttccagggctgctgatccttttccagatagctccagagtatgatgaccccagccccatcccaatctctagcgaaagggttatgcaaatctcagggtgttgcctctaaagaatctaaagaatagacatgctttgggcttactcagtgtaccagattctctagtgggccattctcatttgatgttccctagaacctccctgtcttccaactgcaggatgtgtttacttctcttctgggcttcccctggtttctgtcctagttcccaccccaagtttaagaagacttagattcatttattgctatctgaggccactagtgagatttcagatctctcttttgcaacattttacccatttcccttccccaaaccatgtgcttattagatggttccactcaggaagcaaggaagctaaaactcaagttaatggtctgtggatcccacgaaagtgtgtgtaaactactgactgtttctccactagaggcatttaattgagccaaagatgatggaagaagaaactctcaaagccatgtactttgttaggtgtctggatttttggcctgtttgcagcctctcctagccacagacagacactgtctcctctcagagaaaggccagtgtttcggtccaggccactggtgagtgtcggcacccttgaggtgggcatggagtgagcagaagaagcctggagaagagagaactatttaaaagtgttgccagttattcagcttccaggcggctttgcacctccaaaggtgcaaaaaggaaaaagaaagcagaaaggattcagcatttaagcagaaagaaaagggaaattctactctaccagatgagccactggttccactggagcttatcagtgaagtaacactgcaggagccctggtatccttccctcagagatatcatcaggggccctcaaaccccattgtttatgccagcactgaccgcactttaagcacacacttaccaatcagaggtcgtgtaattggcctaaatctaggcccagttattactacaaatcttagtcaccatactctctcgcccaggctggagtgcagtggtgtgatctcagctcactgcaacctccacctcccaggctcaagggatcctctcacctcagctcccgagcagctaggactgcaggtgtgcaccaccatgcccagctaatttttgaatttttttgtagagatggggttttgccatgttgcccaggctggtctgaagctgctgggctcaagcaatccacctggctgggcctcccaaagcgataggattacaggcgtaagggcccacgcccagcctaccatactgattttcaaggcagggtctaacccttcataagatgtgagttcttccaacccaataagcaggcagctttgaggacaaaaaggcaacattaaaagataagaccctagaagtcagaacatctgtattccaaggccaccccttctccttttagtcatgtgactttgggcaggtcaccctccctgtctgtaaaatgaggttggactggataatctttatgtgccctttccttttggcttaaaattctgtgatttattcattcttaggaagatcagcatatttattgggatttctgcttcaaaaattctttctaacctcaaaaatccaagtccagaattttttgttttcttctggatttaaactgtttaatatgagcacatcaaggttgacttctcatcctttttgggaagtgaatttaatattgagggtaattgaatgatgttgcaatggctttccctcctgctggcttggtaagaatattaaagcctgcagaggtggaaattggagctcatggagaaatggatagaaagcaatttgttgcaggcagcctttggacaagttgttttaataggaaatagacctgctgcttcataggtttcctcaaccacctttcctcagctttcttaaaatgggatctacattggctcttcacacccaaatagcagactaatcgtttttctgcttagcaccgtctggttcattgtcttgaactctgccttacagcagcaagaaaattttcctcgacaagaacctcaatctttagttccattgagctccccctctggattttggacttaccagaagtaggaggttctgataccattcaagatggtctttccttcaaagcaggtctgaagaggagactaccaaagcagtgtttacaaacccagagtccacacaaccatattgcatagaacagcacttggctttcacaagcctcctacaggacctggtgtaattggagtgaaagggcagagaccctggaagtggaggtggctgtgtgctgcgatgggaagaaggcagaaggcccaggggctttggacatagagcagggtggaagctgcaagtactgggaaggaagagagtttcacagaaacaaagctttgtcacacagaaatgagttctgtctcactggtgacttcatccctcaggctccagctgagcagagattttaatcagcttccttaatgggtattgacactgctcaggaagcagtagaccctgtcagggacagctattgatcttttgtgttctgattagattggaaaatagatcaacttcattgtagtccaggaactgttggtcacagctactaggaatgaggtgatttctgagggctgagaaaaaacacagaatcttggccagcagccagcagctgcatggtgaaagatgcattcacttctcctttgagagttggggttgagggcaaacatagaacccaggtttggcttacaacccagtgtcccggaagccctccttcgggagaactgtaagtaagaggtgggtgtgtctaaagacaataccattaatgaatgttctggccttacctaaaaaggtttagcaatttggggataactcttggatctagcttatgtgcgttcacatgcacatttgctagcccagagcttttaaaatgaggtctggcatatacttgattacaaatgaaaactcagaaaccaattttatttattaaatcatatcttttgtttttccccctcccttctaatcccccaaaggacctatttgagctgttccccaattcatctgcttattttggaccatgaatctgccagagtgatattttctgttatttctcctccaaatttttccctgatgtttccaataaagatttacttgggtggccccttaaggtgacatcaggatgctcttatgtccttccagaataagcatacacttcactcctctccctttcatctccctctgcattcttaattccttgcttttctcacttggagccgagggtgctttagagaggtggttttccatgaatcagccaagattcctgtagaagttgggtataccaaccaccaccaccaccgccccctattccagtttcaaagctcctcggctatgctaatgtcccctcagagatgaggtttgacttttaggcccgtatgactcctccatagcctggccaaggagaccatgagtagccatgtctggtttactctttatcctgagactgtttatagcttaaaacagaagtgtgtcttcccagcacaaacctaatcaatcagtgtatcagtgcatctggtggcaacagctcagcccattcaaagagcaaggattcaggaaaggcacactgatggtggggagcctcttaagagcctctaatgttctcccaaaaccagagttgagagtcggagtgccagtcgtcggggcccactattcctgaataagggacatgcaagggccagaagtagcttgactctcgcctaaatatctgtgcctttgcctgtcctttctcccactctactgaaacccggaacagattcccgcttgccttctgatgaagagaggttaggtaaagagagtttggaggaaaaaagacaccaggaggcaggctgcggggtaggagagggttctgagaggaggcagcaatccagaatacctccttttctagccagcatcccttgaacttttgaaaggttgtgcctaccactggctggcacaccagggcaatgatttccctgcagaaggaaggaaagaatgtttcacccttgcatccttcttggagaagctacagcctgtgctcagttgagtggttcacactcagactttggctttatggttttccttcctccttgtctttgccctgaccttgatcaacaggggtgaaaagaaccaccctgaggtttccatgcctctcccattttagtggtagcattttgtgtctttactccacccttcaccctagttccaccaaggttcacacaccagatgtaactgtttttcagctgagttgtatggattaacttcagtccactgtaaatacacctgggatggggtggggttggggttgtttagggagaagcagccagacttgctttgtgaactgaatgtatttttatgcaattttgagtggcctttcaaccctaagatgaatggttttgttttactggttgttgttatatagttttgagtattctgtgtttgaaagtttgggaataataatattcacttctatatgatgcctgtaaacacaacagtatttataaatgagtaaataaaactgtgttttaactttg

SEQ ID NO: 19 - DNA, 3748 bp, Homo sapiens
cgtctgtaaacacccagagactgtcatggagggggaggaggaggcggcggcggcgaagggaggcgtttggggccgcctccagggtccgctctgccattcctgaactggtccctcgtccccgtgactctggcatcagggaagcgaactgttaggcgagaggaggaggcagccagaaccatatccccttcttcctcggggcgggggccgggccaggccggctgagccgggggagggctccgggagggagtgcctggccaggccggcctgtctgccgcgatggatgacagtaaggtggttggaggcaaagtaaagaagcccggtaaacgtggtcggaagccagccaaaattgacttgaaagcaaaacttgagaggagccggcagagtgcaagagaatgccgagcccgaaaaaagctgagatatcagtatttggaagagttggtatccagtcgagaaagagctatatgtgccctcagagaggaactggaaatgtacaagcagtggtgcatggcaatggaccaaggaaaaatcccttctgaaataaaggccctactcactggagaagagcagaacaaatctcagcagaactcaagcaggcataccaaggctgggaagacagatgctaatagcaattcctggtgaagattatataaagatgagtcagtgattgaagccaatattctgattcccatggaagatggatgggcaagagtgtacttcttggctccatttactacctactgctcagtagtcatctctgtaaatctgcaatttctaccaaaatgtgtgatcgtagatctcaaaggatcttgctttaactttcaacacttagaaaatctacaaacattcagacctgtctgggttggtattgccacccatgacatttaacatgttgtgatgcttgaaaacacaggagtagagaaaatcgatgaagattgtatttttgcaccttaactccacattgctttattggttaatttatattctttccatgtaattcatgtaattgtatgtctgtgtgtgttttatgtgtcaccacctttcatgtttttgattgccctacaaagagaaaccaaatgagctgattactgactataagttctcagcctttatggacctaatcttatttttatttacttgagtaatgtttattctctgcatgaaccatgatttctcctgtgagccattccagcataagctgtgaatatgtattaacaaatatatacatttctatttttataatccataaggatatgcctgttttaaataacatacatattaacaatatctatcaggaaaaccctcaagacagcttctagttaaaacctttgttgctgtcctctcaaactatatttataaaaatttgctagggccaaatccatacttgcagaataattcatcaaattttatttttaagtgaaaagtaacctttcaggcatttcagcagcatacattgacaatctagggtatatatgtatgtatgtttcttattgtatgtctatatatgtatgtggggaggacaggagtgaatgttcacacacttttcttgcgtactcaactaaattggagaatgtttctgaagaaaattggatgaaattagctgctgagattgagtttctgccttaaaatctgaaacaaaaaaagggacaaattgctggtagatctactgactgtagccatcaccagaacacttagtttcttcccagacatgaatttcctgacaggctctgagccagaaacacactgtgggcgtgcatctggttcagccctggatatgcctccactgtggagggaagcattggaactggagttgtgcacagcaccgcagctagtgggcctggctgggggtgcagaagggcagggtagttctttccatttccccttgcagctacacttactttctccctgactaccaaatggagtgacggttgaagaatcaagctcataatatgatacacccagacagacccagaaatcttttgatttccccagcgagatacttaccactctctcttctctttcccatggttaaaacaggagttgtgttctctgtcgctgctaaattattcttcacttgagtgaagcaaatatttagcttccaaataaagtatattttgttctgaactggcagtttaagaggagataccgtagtctagattgtctttgaggtagaatatatgatggaccacatagtttaagattacaaggtactttccctcttctctcaggccatgcatttgaataaagtgcctcccttagcctgagctcctaaagacctcttgtacttggttgcaaactcagatctctagtctagtctagtctagtctagtctagtcatgtgtgactgtgtactgagataccactagcccagtttgctgggtctctatgttttggaagttgggggtttaataatatttaatgtctttttaggatcataaacataaataggtttgttgatattcaggccttcagaatttaagggttttaaatatagcattcagattgtaattggtatgtttttgccatctggtccactcaattgtatatttttattttgcaaaacaacccaaaacttactttaygttgctttgttcagtaccttttgaattcccccagaagagttgttttcaaaacaaacattccagaatgaatgtcgctcttcaatggaacgtctttattgtgcttgaagtatttcttctctggttgtaattctaaattacagagtcatttgagctttctcccctcccgctagtatctttacaggagcagggaagagcagtagaggatgtataattttgggcgaagttaaattacaatttatttgaggttattcctaaacctatttatttggtgttttggaggagatcacacactaagagaacgttgattgcctcggctattgtgctggctggacactttggtcacttttgaagcatgttaataaatgtcactgattaaaacagctggagcatttccttccctttccagtgaaggagcagcatagtgaaatcctggcacccctcacctttttgtgatgacaagatggctgacagtcacggagtccaggagaaggtgctgctctccttgctttctgagtaaacagagtaatgttttttttcttattttcccaaagaaagaaaagggggaaaatatatttgtatgtttagaccagccaaattctgtcattattttagtatcaacctgctgtatattagagcaactgaatataatatggaataagtttgaccaggtcaagttttaggatatagttgaatttctttaaaaagttttctattttatctaaaatctttctattatatctaaattagaatgatcatcctgcgcaaattcagattactgtttgctggctaattgacagtatttctcagcatcactatgtagcattctgttttagcatctttgaattatgatcatttgatttggctaattacaaaaagtacaggtttaaactggacttaccttgagttaaaggcaaagaaaatctaaaaacataaatgttatatttcacaagaaatcagttgcatattatccattacatatttagttttaaaaggaggagtcaccttgaattattttctgagtcaccttgagttatttgatctctcagcctgctttctcatctgtaaaaaaggggggaggataactttcacagggtaattggtaggctaaataggagttacagaaaactgttaaatagggaagaactacattaaatttaaatattcacatt

SEQ ID NO: 20 - DNA, 1324 bp, Homo sapiens
cggcacgagcgccgccgaggattcagcagcctcccccttgagccccctcgcttcccgacgttccgttcccccctgcccgccttctcccgccaccgccgccgccgccttccgcaggccgtttccaccgaggaaaaggaatcgtatcgtatgtccgctatccagaacctccactctttcgacccctttgctgatgcaagtaagggtgatgacctgcttcctgctggcactgaggattatatccatataagaattcaacagagaaacggcaggaagacccttactactgtccaagggatcgctgatgattacgataaaaagaaactagtgaaggcgtttaagaaaaagtttgcctgcaatggtactgtaattgagcatccggaatatggagaagtaattcagctacagggtgaccaacgcaagaacatatgccagttcctcgtagagattggactggctaaggacgatcagctgaaggttcatgggttttaagtgcttgtggctcactgaagcttaagtgaggatttccttgcaatgagtagaatttcccttctctcccttgtcacaggtttaaaaacctcacagcttgtataatgtaaccatttggggtccgcttttaacttggactagtgtaactccttcatgcaataaactgaaaagagccatgctgtctagtcttgaagtccctcatttaaacagaggtcaagcaataggcgcctggcagtgtcaagcctgaaaccaagcaataccgtcatgtttcagccaagcccagagccctaagattacaaacaactatggccggaacctcctcagctctccctctgcagagttccctaccctaagagaatgttaccacctgaacagtcctcggtgaatctgagaggagaggatggggtaaggcagaagcaccagctgtactactagaagggagcttttggtggtagatcccctggtgtctccaacctgactaggtggacagagctcaaagaggccctcttaccgctagcgaggtgataggacatctggcttgccacaaaggtctgttcgaccagacatatcctagctaagggatgtccaaacatcagaatgtgaggccaaccttctatcagagttaaacttttgacaagggaacaaatctcaaactgatccatcagtcatgtagctagctgtagagcttgcaacttaatagcagcagctgcccaatgccatgtgaagtaacaaactggtttttggtttttttttccccttcagttttaatgttatgtgtaatgtatttaaacccttatttaaataaaacttgttttcagaaaaaaaaaaaaaaaaaaaa

SEQ ID NO: 21 - DNA, 4469 bp, Homo sapiens
cctgcagcctccggagtcagtgccgcgcgcccgccgccccgcgccttcctgctcgccgcacctccgggagccggggcgcacccagcccgcagcgccgcctccccgcccgcgccgcctccgaccgcaggccgagggccgccactggccggggggaccgggcagcagcttgcggccgcggagccgggcaacgctggggactgcgccttttgtccccggaggtccctggaagtttgcggcaggacgcgcgcggggaggcggcggaggcagccccgacgtcgcggagaacagggcgcagagccggcatgggcatcgggcgcagcgaggggggccgccgcggggccctgggcgtgctgctggcgctgggcgcggcgcttctggccgtgggctcggccagcgagtacgactacgtgagcttccagtcggacatcggcccgtaccagagcgggcgcttctacaccaagccacctcagtgcgtggacatccccgcggacctgcggctgtgccacaacgtgggctacaagaagatggtgctgcccaacctgctggagcacgagaccatggcggaggtgaagcagcaggccagcagctgggtgcccctgctcaacaagaactgccacgccgggacccaggtcttcctctgctcgctcttcgcgcccgtctgcctggaccggcccatctacccgtgtcgctggctctgcgaggccgtgcgcgactcgtgcgagccggtcatgcagttcttcggcttctactggcccgagatgcttaagtgtgacaagttcccggagggggacgtctgcatcgccatgacgccgcccaatgccaccgaagcctccaagccccaaggcacaacggtgtgtcctccctgtgacaacgagttgaaatctgaggccatcattgaacatctctgtgccagcgagtttgcactgaggatgaaaataaaagaagtgaaaaaagaaaatggcgacaagaagattgtccccaagaagaagaagcccctgaagttggggcccatcaagaagaaggacctgaagaagcttgtgctgtacctgaagaatggggctgactgtccctgccaccagctggacaacctcagccaccacttcctcatcatgggccgcaaggtgaagagccagtacttgctgacggccatccacaagtgggacaagaaaaacaaggagttcaaaaacttcatgaagaaaatgaaaaaccatgagtgccccacctttcagtccgtgtttaagtgattctcccgggggcagggtggggagggagcctcgggtggggtgggagcgggggggacagtgcccgggaacccgtggtcacacacacgcactgccctgtcagtagtggacattgtaatccagtcggcttgttcttgcagcattcccgctccctttccctccatagccacgctccaaaccccagggtagccatggccgggtaaagcaagggccatttagattaggaaggtttttaagatccgcaatgtggagcagcagccactgcacaggaggaggtgacaaaccatttccaacagcaacacagccactaaaacacaaaaagggggattgggcggaaagtgagagccagcagcaaaaactacattttgcaacttgttggtgtggatctattggctgatctatgcctttcaactagaaaattctaatgattggcaagtcacgttgttttcaggtccagagtagtttctttctgtctgctttaaatggaaacagactcataccacacttacaattaaggtcaagcccagaaagtgataagtgcagggaggaaaagtgcaagtccattatctaatagtgacagcaaagggaccaggggagaggcattgccttctctgcccacagtctttccgtgtgattgtctttgaatctgaatcagccagtctcagatgccccaaagtttcggttcctatgagcccggggcatgatctgatccccaagacatgtggaggggcagcctgtgcctgcctttgtgtcagaaaaaggaaaccacagtgagcctgagagagacggcgattttcgggctgagaaggcagtagttttcaaaacacatagttaaaaaagaaacaaatgaaaaaaattttagaacagtccagcaaattgctagtcagggtgaattgtgaaattgggtgaagagcttaggattctaatctcatgttttttccttttcacatttttaaaagaacaatgacaaacacccacttatttttcaaggttttaaaacagtctacattgagcatttgaaaggtgtgctagaacaaggtctcctgatccgtccgaggctgcttcccagaggagcagctctccccaggcatttgccaagggaggcggatttccctggtagtgtagctgtgtggctttccttcctgaagagtccgtggttgccctagaacctaacaccccctagcaaaactcacagagctttccgtttttttctttcctgtaaagaaacatttcctttgaacttgattgcctatggatcaaagaaattcagaacagcctgcctgttcccccgcactttttacatatatttgtttcatttctgcagatggaaagttgacatgggtggggtgtccccatccagcgagagagtttcaaaagcaaaacatctctgcagtttttcccaagtaccctgagatacttcccaaagcccttatgtttaatcagcgatgtatataagccagttcacttagacaactttacccttcttgtccaatgtacaggaagtagttctaaaaaaaatgcatattaatttcttcccccaaagccggattcttaattctctgcaacactttgaggacatttatgattgtccctctgggccaatgcttatacccagtgaggatgctgcagtgaggctgtaaagtggccccctgcggccctagcctgacccggagaaaggatggtagattctgttaactcttgaagactccagtatgaaaatcagcatgcccgcctagttacctaccggagagttatcctgataaattaacctctcacagttagtgatcctgtccttttaacaccttttttgtggggttctctctgacctttcatcgtaaagtgctggggaccttaagtgatttgcctgtaattttggatgattaaaaaatgtgtatatatattagctaattagaaatattctacttctctgttgtcaaactgaaattcagagcaagttcctgagtgcgtggatctgggtcttagttctggttgattcactcaagagttcagtgctcatacgtatctgctcattttgacaaagtgcctcatgcaaccgggccctctctctgcggcagagtccttagtggaggggtttacctggaacataagtagttaccacagaatacggaagagcaggtgactgtgctgtgcagctctctaaatgggaattctcaggtaggaagcaacagcttcagaaagagctcaaaataaattggaaatgtgaatcgcagctgtgggttttaccaccgtctgtctcagagtcccaggaccttgagtgtcattagttactttattgaaggttttagacccatagcagctttgtctctgtcacatcagcaatttcagaaccaaaagggaggctctctgtaggcacagagctgcactatcacgagcctttgtttttctccacaaagtatctaacaaaaccaatgtgcagactgattggcctggtcattggtctccgagagaggaggtttgcctgtgatttgcctgtgatttcctaattatcgctagggccaaggtgggatttgtaaagctttacaataatcattctggatagagtcctgggaggtccttggcagaactcagttaaatctttgaagaatatttgtagttatcttagaagatagcatgggaggtgaggattccaaaaacattttatttttaaaatatcctgtgtaacacttggctcttggtacctgtgggttagcatcaagttctccccagggtagaattcaatcagagctccagtttgcatttggatgtgtaaattacagtaatcccatttcccaaacctaaaatctgtttttctcatcagactctgagtaactggttgctgtgtcataacttcatagatgcaggaggctcaggtgatctgtttgaggagagcaccctaggcagcctgcagggaataacatactggccgttctgacctgttgccagcagatacacaggacatggatgaaattcccgtttcctctagtttcttcctgtagtactcctcttttagatcctaagtctcttacaaaagctttgaatactgtgaaaatgttttacattccatttcatttgtgttgtttttttaactgcattttaccagatgttttgatgttatcgcttatgttaatagtaattcccgtacgtgttcattttattttcatgctttttcagccatgtatcaatattcacttgactaaaatcactcaattaatcaatgaaaaaaaaaaa

SEQ ID NO: 22 - DNA, 1553 bp, Homo sapiens
gaattccgaagctgaaaccggagccggtccgctgggcggcgggcgccgggggccggaggggcgcgcgcggcggcggcaccccagcgtttaggcgcggaggcagccatggcgggcaacttcgactcggaggagcggagtagctggtactgggggcggttgagtcggcaggaggcggtggcgctgctgcagggccagcggcacggggtgttcctggtgcgggactcgagcaccagccccggggactatgtgctcagcgtctcagagaactcgcgcgtctcccactacatcatcaacagcagcggcccgcgcccgccggtgccaccgtcgcccgcccagcctccgcccggggtgagcccctccagactccgaataggagatcaagagtttgattcattgcctgctttactggaattctacaaaatacactattgggacactacaacgttgatagaaccagtttccagatccaggcagggtagtggagtgattctcaggcaggaggaggcggagtatgtgcgagccctctttgactttaatgggaatgatgaggaagatcttccctttaagaaaggagacatcttgagaatccgggacaagcctgaagagcagtggtggaatgcggaggacagcgaaggcaagagagggatgattccagtcccttacgtcgagaagtatagacctgcctccgcctcagtatcggctctgattggaggtaaccaggagggttcccacccacagccactgggccccccggagcctggcccctatgcccaacccagcgtcaacactccgctccctaacctccagaatgggcccatatatgccagggttatccagaagcgagtccccaatgcctacgacaagacagccttggctttggaggtcggtgagctggtaaaggttacgaagattaatgtgagtggtcagtgggaaggggggtgtaatggcaaacgaggtcacttcccattcacacatgtccgtctgctggatcaacagaatcccgatgaggacttcagctgagtatagttcaacagttttgctgacagatgggaacaatcttttttttttttttttccaactgccatctatacaattttcttacagatgtcaaaagcagtctagtttatataagcattctgttacctgtgatattttttagactgaactgctccattcctagtcttaattaccatattcagggtacgaactggagggcttgtgtgttagcttctgaattggcaattggaggcggtagtggtcgtgcctgtgtgtatcagaagggataggtatcttgcctcctttctctcaggcagtgcaaatcaccctgtggaaaaccgatggacaggaaggagtgttacacactgcttaccctgatttattcagtggttttgttttcattctggaaccatactatcaaatggcgacagactgttccgttccacccccgtgaagagtaatcatgcaccgtgtgaatagtatcaagcaggattgctttcattgtatggagcgtgaccagggtatgactcattctgacattcagatcctaagaattc

SEQ ID NO: 23 - DNA, 5921 bp, Homo sapiens
agcagacgggagtttctcctcggggtcggagcaggaggcacgcggagtgtgaggccacgcatgagcggacgctaaccccctccccagccacaaagagtctacatgtctagggtctagacatgttcagctttgtggacctccggctcctgctcctcttagcggccaccgccctcctgacgcacggccaagaggaaggccaagtcgagggccaagacgaagacatcccaccaatcacctgcgtacagaacggcctcaggtaccatgaccgagacgtgtggaaacccgagccctgccggatctgcgtctgcgacaacggcaaggtgttgtgcgatgacgtgatctgtgacgagaccaagaactgccccggcgccgaagtccccgagggcgagtgctgtcccgtctgccccgacggctcagagtcacccaccgaccaagaaaccaccggcgtcgagggacccaagggagacactggcccccgaggcccaaggggacccgcaggcccccctggccgagatggcatccctggacagcctggacttcccggaccccccggaccccccggacctcccggaccccctggcctcggaggaaactttgctccccagctgtcttatggctatgatgagaaatcaaccggaggaatttccgtgcctggccccatgggtccctctggtcctcgtggtctccctggcccccctggtgcacctggtccccaaggcttccaaggtccccctggtgagcctggcgagcctggagcttcaggtcccatgggtccccgaggtcccccaggtccccctggaaagaatggagatgatggggaagctggaaaacctggtcgtcctggtgagcgtgggcctcctgggcctcagggtgctcgaggattgcccggaacagctggcctccctggaatgaagggacacagaggtttcagtggtttggatggtgccaagggagatgctggtcctgctggtcctaagggtgagcctggcagccctggtgaaaatggagctcctggtcagatgggcccccgtggcctgcctggtgagagaggtcgccctggagcccctggccctgctggtgctcgtggaaatgatggtgctactggtgctgccgggccccctggtcccaccggccccgctggtcctcctggcttccctggtgctgttggtgctaagggtgaagctggtccccaagggccccgaggctctgaaggtccccagggtgtgcgtggtgagcctggcccccctggccctgctggtgctgctggccctgctggaaaccctggtgctgatggacagcctggtgctaaaggtgccaatggtgctcctggtattgctggtgctcctggcttccctggtgcccgaggcccctctggaccccagggccccggcggccctcctggtcccaagggtaacagcggtgaacctggtgctcctggcagcaaaggagacactggtgctaagggagagcctggccctgttggtgttcaaggaccccctggccctgctggagaggaaggaaagcgaggagctcgaggtgaacccggacccactggcctgcccggaccccctggcgagcgtggtggacctggtagccgtggtttccctggcgcagatggtgttgctggtcccaagggtcccgctggtgaacgtggttctcctggccccgctggccccaaaggatctcctggtgaagctggtcgtcccggtgaagctggtctgcctggtgccaagggtctgactggaagccctggcagccctggtcctgatggcaaaactggcccccctggtcccgccggtcaagatggtcgccccggacccccaggcccacctggtgcccgtggtcaggctggtgtgatgggattccctggacctaaaggtgctgctggagagcccggcaaggctggagagcgaggtgttcccggaccccctggcgctgtcggtcctgctggcaaagatggagaggctggagctcagggaccccctggccctgctggtcccgctggcgagagaggtgaacaaggccctgctggctcccccggattccagggtctccctggtcctgctggtcctccaggtgaagcaggcaaacctggtgaacagggtgttcctggagaccttggcgcccctggcccctctggagcaagaggcgagagaggtttccctggcgagcgtggtgtgcaaggtccccctggtcctgctggaccccgaggggccaacggtgctcccggcaacgatggtgctaagggtgatgctggtgcccctggagctcccggtagccagggcgcccctggccttcagggaatgcctggtgaacgtggtgcagctggtcttccagggcctaagggtgacagaggtgatgctggtcccaaaggtgctgatggctctcctggcaaagatggcgtccgtggtctgaccggccccattggtcctcctggccctgctggtgcccctggtgacaagggtgaaagtggtcccagcggccctgctggtcccactggagctcgtggtgcccccggagaccgtggtgagcctggtccccccggccctgctggctttgctggcccccctggtgctgacggccaacctggtgctaaaggcgaacctggtgatgctggtgccaaaggcgatgctggtccccctgggcctgccggacccgctggaccccctggccccattggtaatgttggtgctcctggagccaaaggtgctcgcggcagcgctggtccccctggtgctactggtttccctggtgctgctggccgagtcggtcctcctggcccctctggaaatgctggaccccctggccctcctggtcctgctggcaaagaaggcggcaaaggtccccgtggtgagactggccctgctggacgtcctggtgaagttggtccccctggtccccctggccctgctggcgagaaaggatcccctggtgctgatggtcctgctggtgctcctggtactcccgggcctcaaggtattgctggacagcgtggtgtggtcggcctgcctggtcagagaggagagagaggcttccctggtcttcctggcccctctggtgaacctggcaaacaaggtccctctggagcaagtggtgaacgtggtccccccggtcccatgggcccccctggattggctggaccccctggtgaatctggacgtgagggggctcctgctgccgaaggttcccctggacgagacggttctcctggcgccaagggtgaccgtggtgagaccggccccgctggaccccctggtgctcctggtgctcctggtgcccctggccccgttggccctgctggcaagagtggtgatcgtggtgagactggtcctgctggtcccgccggtcccgtcggccccgtcggcgcccgtggccccgccggaccccaaggcccccgtggtgacaagggtgagacaggcgaacagggcgacagaggcataaagggtcaccgtggcttctctggcctccagggtccccctggccctcctggctctcctggtgaacaaggtccctctggagcctctggtcctgctggtccccgaggtccccctggctctgctggtgctcctggcaaagatggactcaacggtctccctggccccattgggccccctggtcctcgcggtcgcactggtgatgctggtcctgttggtccccccggccctcctggacctcctggtccccctggtcctcccagcgctggtttcgacttcagcttcctgccccagccacctcaagagaaggctcacgatggtggccgctactaccgggctgatgatgccaatgtggttcgtgaccgtgacctcgaggtggacaccaccctcaagagcctgagccagcagatcgagaacatccggagcccagagggaagccgcaagaaccccgcccgcacctgccgtgacctcaagatgtgccactctgactggaagagtggagagtactggattgaccccaaccaaggctgcaacctggatgccatcaaagtcttctgcaacatggagactggtgagacctgcgtgtaccccactcagcccagtgtggcccagaagaactggtacatcagcaagaaccccaaggacaagaggcatgtctggttcggcgagagcatgaccgatggattccagttcgagtatggcggccagggctccgaccctgccgatgtggccatccagctgaccttcctgcgcctgatgtccaccgaggcctcccagaacatcacctaccactgcaagaacagcgtggcctacatggaccagcagactggcaacctcaagaaggccctgctcctcaagggctccaacgagatcgagatccgcgccgagggcaacagccgcttcacctacagcgtcactgtcgatggctgcacgagtcacaccggagcctggggcaagacagtgattgaatacaaaaccaccaagtcctcccgcctgcccatcatcgatgtggcccccttggacgttggtgccccagaccaggaattcggcttcgacgttggccctgtctgcttcctgtaaactccctccatcccaacctggctccctcccacccaaccaactttccccccaacccggaaacagacaagcaacccaaactgaacccccccaaaagccaaaaaatgggagacaatttcacatggactttggaaaatatttttttcctttgcattcatctctcaaacttagtttttatctttgaccaaccgaacatgaccaaaaaccaaaagtgcattcaaccttaccaaaaaaaaaaaaaaaaaaaaaagaataaataaataagtttttaaaaaaggaagcttggtccacttgcttgaagacccatgcgggggtaagtccctttctgcccgttgggttatgaaaccccaatgctgccctttctgctcctttctccacaccccccttggcctcccctccactccttcccaaatctgtctccccagaagacacaggaaacaatgtattgtctgcccagcaatcaaaggcaatgctcaaacacccaagtggcccccaccctcagcccgctcctgcccgcccagcacccccaggccctggggacctggggttctcagactgccaaagaagccttgccatctggcgctcccatggctcttgcaacatctccccttcgtttttgagggggtcatgccgggggagccaccagcccctcactgggttcggaggagagtcaggaagggccacgacaaagcagaaacatcggatttggggaacgcgtgtcatcccttgtgccgcaggctgggcgggagagactgttctgttctgttccttgtgtaactgtgttgctgaaagactacctcgttcttgtcttgatgtgtcaccggggcaactgcctgggggcggggatgggggcagggtggaagcggctccccatttttataccaaaggtgctacatctatgtgatgggtggggtggggagggaatcactggtgctatagaaattgagatgcccccccaggccagcaaatgttcctttttgttcaaagtctatttttattccttgatattttttctttctttttttttttttttgtggatggggacttgtgaatttttctaaaggtgctatttaacatgggaggagagcgtgtgcgctccagcccagcccgctgctcactttccaccctctctccacctgcctctggcttctcaggcctctgctctccgacctctctcctctgaaaccctcctccacagctgcagcccatcctcccggctccctcctagtctgtcctgcgtcctctgtccccgggtttcagagacaacttcccaaagcacaaagcagtttttccctaggggtgggaggaagcaaaagactctgtacctattttgtatgtgtataataatttgagatgtttttaattattttgattgctggaataaagcatgtggaaatgacccaaacataa

SEQ ID NO: 24 - DNA, 662 bp, Homo sapiens
accgccgacgcagacccctctctgcacgccagcccgcccgcacccaccatggccacagttcagcagctggaaggaagatggcgcctggtggacagcaaaggctttgatgaatacatgaaggagctaggagtgggaatagctttgcgaaaaatgggcgcaatggccaagccagattgtatcatcacttgtgatggtaaaaacctcaccataaaaactgagagcactttgaaaacaacacagttttcttgtaccctgggagagaagtttgaagaaaccacagctgatggcagaaaaactcagactgtctgcaactttacagatggtgcattggttcagcatcaggagtgggatgggaaggaaagcacaataacaagaaaattgaaagatgggaaattagtggtggagtgtgtcatgaacaatgtcacctgtactcggatctatgaaaaagtagaataaaaattccatcatcactttggacaggagttaattaagagaatgaccaagctcagttcaatgagcaaatctccatactgtttctttcttttttttttcattactgtgttcaattatctttatcataaacattttacatgcagctatttcaaagtgtgttggattaattaggatcatccctttggttaataaataaatgtgtttgtgct

SEQ ID NO: 25 - DNA, 5129 bp, Homo sapiens
gcggccgcagtggggtggagggggcagggcgtggtgaggtaaggtgagtgccgtagtggggttccctggagccatggcctgctccattgtccagttctgctacttccaggacctccaggccgcccgggacttcctctttcctcacctgcgggaggagatcctcagcggcgccttgcggagggaccccagtaaatcaacagactgggaagatgatggttggggagcatgggaagaaaatgaaccacaagaacctgaagaagaaggaaatacttgcaaaacacaaaaaacttcctggctccaagattgtgttttatccttatctccaaccaatgatcttatggtgatagctcgagagcaaaaagctgtatttctagtgccaaaatggaaatatagtgataaaggaaaggaagaaatgcaatttgctgttggctggagtggttccttaaatgtcgaagaaggggaatgtgtaaccagtgctctatgtatcccactagcaagccaaaagaggagttccactgggcgtcctgactggacctgcattgtggtgggttttacttcaggttatgtacgcttctacactgagaatggtgtgctcttgcttgcacagcttttgaatgaggacccagtacttcaacttaaatgcagaacctatgaaataccacgacatcccggcgtgactgagcagaatgaagagttgagtatcttatatccagctgccattgtgactattgatggatttagcctttttcaatctcttcgtgcttgtcgaaatcaggtagcaaaagctgcagcatcaggcaatgagaacatacaaccaccaccattagcttataagaaatggggtctacaagatattgacactattattgatcatgctagtgttggtattatgactctgtccccctttgatcaaatgaagactgcctccaatataggtggatttaatgcagcaattaaaaatagtccacctgccatgtctcagtatatcactgtagggtccaatccatttactggcttcttctatgctttagagggaagcacacaaccattattatcccatgttgcactagcagttgcaagtaaactcacttctgctttatttaatgctgccagtggttggcttggttggaaaagtaagcacgaagaagaagctgtccaaaagcaaaagccgaaggttgagccagctaccccattagctgtaagatttggacttccagattctagacgccatggtgaaagcatatgtctgtctccatgtaacacactggcagcagtaacagatgatttcggcagagttattttattggatgtagctagaggaattgcaatacgcatgtggaaagggtaccgcgacgcacaaattggatggattcaaactgtagaggacctccatgaaagagtgccagaaaaggcagatttttccccctttggaaattctcagggtccaagtcgagtagctcaattccttgtgatctatgcgccaagaaggggaattttagaagtgtggagcacacagcagggacctagagtaggagctttcaatgtggggaagcactgcaggctgctgtatcctggctataaaataatgggtttaaataatgttaccagtcagagttggcagccacagacttatcagatctgtctggttgatccagtgtctggaagtgtgaaaacagtgaacgttcccttccatttagcactgagtgataagaagagtgaacgagccaaggatatgcacctagtgaagaaactagcagccttactgaaaacaaaatctcccaatcttgatttggttgaaacagaaataaaggaattaattcttgatattaaataccctgcaaccaaaaaacaagctttggaaagcattttggcaagtgaacgtttaccattttcttgccttagaaacatcactcagactttaatggacactttaaaaagtcaagaacttgagtctgttgatgaaggattgctacagttttgtgccaataaactaaaactgctgcaactctatgagtctgtcagtcaattaaattcccttgattttcatttagacacaccattctctgataatgacttggctctgttactaaggcttgatgaaaaagaactgcttaagctccaggcattactagagaaatataagcaagagaacaccaggacaaatgttcgattttctgatgataaagatggtgtgttgcctgtaaaaacattcttggaatatttagaatatgaaaaggatgtgctcaacataaagaaaataagtgaagaggaatatgtggctttaggtagtttctttttttggaagtgtttgcatggagaaagctccactgaggatatgtgtcacactttggagtcggctggtcttagccctcagctgttgttgtctctgctcctgagtgtttggctttcaaaggaaaaggatattttggataaaccacagtcaatctgctgtcttcataccatgctgtccctcctgagcaagatgaaagtggccatcgatgagacctgggattctcagtctgtgtccccatggtggcagcagatgcgcacagcctgtattcagtctgagaacaatggagccgctctgttgtctgcgcatgttgggcattctgttgctgcacagatatcaaacaacatgacagagaaaaaattttcccaaacagttttgggtgctgattcagaggccctcactgattcctgggaggcactttctcttgacactgagtactggaaactccttctgaaacagctggaggattgtctcatacttcagactctgcttcacagcaaagggaacactcagacctccaaagtgtcatcactgcaggctgagccacttccaaggctttctgttaaaaagttattagaaggaggaaaaggtggcattgcagacagtgtagccaagtggatatttaaacaggacttcagccctgaagtattaaaactggctaatgaagaaagagatgcagaaaacccagatgaacccaaagaaggtgttaacagaagtttccttgaggtatcagagatggagatggacttaggagccataccagacttactgcatttagcctatgagcagtttccttgtagccttgagctcgatgtcttgcatgcacattgctgctgggagtacgttgttcagtggaataaagatccagaggaagcacgtttttttgttaggtcaatagaacacttgaagcaaatatttaatgcacatgttcaaaatggcattgcactgatgatgtggaatacgttcttagttaaaagattttctgctgctacatacttaatggataaggttggaaaatcaccaaaagataggttatgccgaagggatgtgggaatgagtgacacagcaatgacatctttcctcggctcctgtttggatcttcttcagatcttaatggaggcagatgttagcagggatgaaatacaggtgcctgtgctggatactgaggatgcgtggctctccgtggaaggaccaatctccatagtggaactggcccttgaacagaagcacatccactacccactggtggagcaccactccatcctgtgctccatcttgtatgcagtcatgaggttttctctgaagaccgtgaagccactttcactttttgacagtaagggaaaaaatgcatttttcaaagacctaacttcaattcagttattacctagtggggaaatggatccaaattttatttctgtacgacaacagttcttattgaaagttgtcagtgcagctgtccaggcccaacattcagccacaaaggtcaaagatcccacagaagaggccacacccactccttttgggaaagaccaagattggccagctctagctgtggatttagcccatcaccttcaagttagtgaagatgttgttagaaggcattatgtgggggaactatacaactatggagttgaccacttaggagaagaggccattctacaggttcatgacaaagaggtccttgcctctcagctgctggtgctcacggggcaaaggctggctcatgcgcttctccacacccagacaaaagaaggaatggagctgcttgccagacttccacccacactgtgtacttggctgaaagcaatggacccccaggaccttcaaaacactgaagtgccaattgcaacaacagctaaactagtaaataaagtaattgagcttttaccagaaaaacatgggcaatatggtctagccttacacctcattgaagctgtggaagccatatctcttccttctttatgacacttacctactggaaatagtctaaaattatgattataacatgaagtagtgcatggttattttacatagtaagacctggaattttatgggaaaagtatgtctttttttttccttttgtaaaataaataaaagtatatacaacttttaaaaagtgcaaccctggctaaattccactcctttggttaatactgaagataaaatataaacaaatgtcaactctgttataattaatacagatgttttactgtttatttctaattcaaacacttaagtagctttattgttaaactttgctatttaaaattggttataatttagattatgttcttataagattctatatttcctatctaaaatgttgttgtaattcaatttaaatgtgttcatgtacagtccccatcagtagcgtatagaacaccccactctcctttagtaaatgttgagaaaatgcctttgttgtcatgctccaaatcccacactgggctgccacctgggagttctggataccgaaaggttcctttcccagaggttctgctgttgccatcagaggaggatgaccgtgcttgaggaggaagaatgggttcaagatcatcatattcatcagaaggggacactaaatagaacccttaacctgttgtacttgccaaaattgagaatcagagatgtgtaaaatgcagcaaattaattataatgtaagttaagatttgctttttgccaagttgcaaagttgtatccacatcaggtcactgtaaaaatgtattatcttgtaaaacttatgtaaaaaaaaaaaaaaaaaaaaggcaaagatactaaaaaaaaaaaaattttagtccgactttatttttcctacaagtgtttaggaaatgcttctggg

SEQ ID NO: 26 - DNA, 5084 bp, Homo sapiens
agcaccacggcagcaggaggtttcggctaagttggaggtactggccacgactgcatgcccgcgcccgccaggtgatacctccgccggtgacccaggggctctgcgacacaaggagtctgcatgtctaagtgctagacatgctcagctttgtggatacgcggactttgttgctgcttgcagtaaccttatgcctagcaacatgccaatctttacaagaggaaactgtaagaaagggcccagccggagatagaggaccacgtggagaaaggggtccaccaggccccccaggcagagatggtgaagatggtcccacaggccctcctggtccacctggtcctcctggcccccctggtctcggtgggaactttgctgctcagtatgatggaaaaggagttggacttggccctggaccaatgggcttaatgggacctagaggcccacctggtgcagctggagccccaggccctcaaggtttccaaggacctgctggtgagcctggtgaacctggtcaaactggtcctgcaggtgctcgtggtccagctggccctcctggcaaggctggtgaagatggtcaccctggaaaacccggacgacctggtgagagaggagttgttggaccacagggtgctcgtggtttccctggaactcctggacttcctggcttcaaaggcattaggggacacaatggtctggatggattgaagggacagcccggtgctcctggtgtgaagggtgaacctggtgcccctggtgaaaatggaactccaggtcaaacaggagcccgtgggcttcctggtgagagaggacgtgttggtgcccctggcccagctggtgcccgtggcagtgatggaagtgtgggtcccgtgggtcctgctggtcccattgggtctgctggccctccaggcttcccaggtgcccctggccccaagggtgaaattggagctgttggtaacgctggtcctgctggtcccgccggtccccgtggtgaagtgggtcttccaggcctctccggccccgttggacctcctggtaatcctggagcaaacggccttactggtgccaagggtgctgctggccttcccggcgttgctggggctcccggcctccctggaccccgcggtattcctggccctgttggtgctgccggtgctactggtgccagaggacttgttggtgagcctggtccagctggctccaaaggagagagcggtaacaagggtgagcccggctctgctgggccccaaggtcctcctggtcccagtggtgaagaaggaaagagaggccctaatggggaagctggatctgccggccctccaggacctcctgggctgagaggtagtcctggttctcgtggtcttcctggagctgatggcagagctggcgtcatgggccctcctggtagtcgtggtgcaagtggccctgctggagtccgaggacctaatggagatgctggtcgccctggggagcctggtctcatgggacccagaggtcttcctggttcccctggaaatatcggccccgctggaaaagaaggtcctgtcggcctccctggcatcgacggcaggcctggcccaattggcccagctggagcaagaggagagcctggcaacattggattccctggacccaaaggccccactggtgatcctggcaaaaacggtgataaaggtcatgctggtcttgctggtgctcggggtgctccaggtcctgatggaaacaatggtgctcagggacctcctggaccacagggtgttcaaggtggaaaaggtgaacagggtcccgctggtcctccaggcttccagggtctgcctggcccctcaggtcccgctggtgaagttggcaaaccaggagaaaggggtctccatggtgagtttggtctccctggtcctgctggtccaagaggggaacgcggtcccccaggtgagagtggtgctgccggtcctactggtcctattggaagccgaggtccttctggacccccagggcctgatggaaacaagggtgaacctggtgtggttggtgctgtgggcactgctggtccatctggtcctagtggactcccaggagagaggggtgctgctggcatacctggaggcaagggagaaaagggtgaacctggtctcagaggtgaaattggtaaccctggcagagatggtgctcgtggtgctcatggtgctgtaggtgcccctggtcctgctggagccacaggtgaccggggcgaagctggggctgctggtcctgctggtcctgctggtcctcggggaagccctggtgaacgtggcgaggtcggtcctgctggccccaacggatttgctggtccggctggtgctgctggtcaaccgggtgctaaaggagaaagaggagccaaagggcctaagggtgaaaacggtgttgttggtcccacaggccccgttggagctgctggcccagctggtccaaatggtccccccggtcctgctggaagtcgtggtgatggaggcccccctggtatgactggtttccctggtgctgctggacggactggtcccccaggaccctctggtatttctggccctcctggtccccctggtcctgctgggaaagaagggcttcgtggtcctcgtggtgaccaaggtccagttggccgaactggagaagtaggtgcagttggtccccctggcttcgctggtgagaagggtccctctggagaggctggtactgctggacctcctggcactccaggtcctcagggtcttcttggtgctcctggtattctgggtctccctggctcgagaggtgaacgtggtctacctggtgttgctggtgctgtgggtgaacctggtcctcttggcattgccggccctcctggggcccgtggtcctcctggtgctgtgggtagtcctggagtcaacggtgctcctggtgaagctggtcgtgatggcaaccctgggaacgatggtcccccaggtcgcgatggtcaacccggacacaagggagagcgcggttaccctggcaatattggtcccgttggtgctgcaggtgcacctggtcctcatggccccgtgggtcctgctggcaaacatggaaaccgtggtgaaactggtccttctggtcctgttggtcctgctggtgctgttggcccaagaggtcctagtggcccacaaggcattcgtggcgataagggagagcccggtgaaaaggggcccagaggtcttcctggcttaaagggacacaatggattgcaaggtctgcctggtatcgctggtcaccatggtgatcaaggtgctcctggctccgtgggtcctgctggtcctaggggccctgctggtccttctggccctgctggaaaagatggtcgcactggacatcctggtacggttggacctgctggcattcgaggccctcagggtcaccaaggccctgctggcccccctggtccccctggccctcctggacctccaggtgtaagcggtggtggttatgactttggttacgatggagacttctacagggctgaccagcctcgctcagcaccttctctcagacccaaggactatgaagttgatgctactctgaagtctctcaacaaccagattgagacccttcttactcctgaaggctctagaaagaacccagctcgcacatgccgtgacttgagactcagccacccagagtggagcagtggttactactggattgaccctaaccaaggatgcactatggatgctatcaaagtatactgtgatttctctactggcgaaacctgtatccgggcccaacctgaaaacatcccagccaagaactggtataggagctccaaggacaagaaacacgtctggctaggagaaactatcaatgctggcagccagtttgaatataatgtagaaggagtgacttccaaggaaatggctacccaacttgccttcatgcgcctgctggccaactatgcctctcagaacatcacctaccactgcaagaacagcattgcatacatggatgaggagactggcaacctgaaaaaggctgtcattctacagggctctaatgatgttgaacttgttgctgagggcaacagcaggttcacttacactgttcttgtagatggctgctctaaaaagacaaatgaatggggaaagacaatcattgaatacaaaacaaataagccatcacgcctgcccttccttgatattgcacctttggacatcggtggtgctgaccatgaattctttgtggacattggcccagtctgtttcaaataaatgaactcaatctaaattaaaaaagaaagaaatttgaaaaaactttctctttgccatttcttcttcttcttttttaactgaaagctgaatccttccatttcttctgcacatctacttgcttaaattgtgggcaaaagagaaaaagaaggattgatcagagcattgtgcaatacagtttcattaactccttcccccgctcccccaaaaatttgaatttttttttcaacactcttacacctgttatggaaaatgtcaacctttgtaagaaaaccaaaataaaaattgaaaaataaaaaccataaacatttgcaccacttgtggcttttgaatatcttccacagagggaagtttaaaacccaaacttccaaaggtttaaactacctcaaaacactttcccatgagtgtgatccacattgttaggtgctgacctagacagagatgaactgaggtccttgttttgttttgttcataatacaaaggtgctaattaatagtatttcagatacttgaagaatgttgatggtgctagaagaatttgagaagaaatactcctgtattgagttgtatcgtgtggtgtattttttaaaaaatttgatttagcattcatattttccatcttattcccaattaaaagtatgcagattatttgcccaaagttgtcctcttcttcagattcagcatttgttctttgccagtctcattttcatcttcttccatggttccacagaagctttgtttcttgggcaagcagaaaaattaaattgtacctattttgtatatgtgagatgtttaaataaattgtgaaaaaaatgaaataaagcatgtttggttttccaaaagaacatat

SEQ ID NO: 27 - DNA, 1575 bp, Homo sapiens
gagagaggaagcttgaagccaatatggagtccgtcagttgctccgctgctgctgtcaggaccggagacatggagtcccagcgggacctgagcctggtgcctgagcggcttcagagacgcgaacaagaacggcagctggaagttgaaaggcggaaacaaaagcggcagaaccaggaggtagagaaggagaacagccactttttcgtcgccacctttgctcgggagcgagcggccgtggaagagcttctggagcgcgcggagtcggtcgagcggctggaggaggcggcctctcggctccaggggctgcagaaactaatcaacgactcagtttttttcctagccgcttacgacctgcggcagggacaagaggcgctggcgcggctgcaggcggccttggccgagcggcgccgggggctgcagcccaagaagcgtttcgctttcaagacccggggaaaggatgctgcttcgtctaccaaagtagacgcggctcctggcatccccccggcagttgaaagcatacaggactccccgctgcccaagaaggcggaaggagacctcggccccagctgggtctgcggtttctccaacctggagtcccaagtcttggagaagagagccagcgagttgcaccagcgcgacgttcttttgaccgaactgagcaactgcacggtcagactgtatggaaatcccaacaccctgcggctaaccaaggcccacagctgcaagctgctctgcggtccggtgtctacctctgttttcctggaggactgcagtgactgcgtgctggcagtggcctgccaacagctccgcatacacagtacgaaagacacccgcatcttcctgcaggtgaccagcagggccatcgtggaggactgcagtgggatccagttcgccccttacacctggagctacccggagatcgacaaggacttcgagagctctggtttagataggagcaaaaataactggaacgatgttgacgattttaactggctggcccgggatatggcctccccaaactggagtattcttcctgaagaggagcgaaatatccagtgggactaagcagttgtcactctgttcttcactcctaccaaatactttccacgttggactttcccccttattgggtctcgaagtttacttattgtcacactgtgtatgttttcagcattttaaggctagagattgtaatgggctcctacttgtaatttccattaaattcgtaacaggtataacactaaagcatttttgctattttcgtcatgcctttgagactgagtcttactccgtcccccagcgtggtggcgcgctgggattacaggcgcgcgccaccacgcgaactcgtatttttagtagagacggggtttcgccatgttgtccgggctgctctcgaactcctgacctcaggtgatccacccgcttcagcttcccaaagtgctggcattacaggcgtgagccaccacgccagggctttatttatttatttttaccacaatagtttgaagcagtaagggggaaggagggtgattatattgctttgtaatggtttgtgatacttgaaacatcacggtgc

SEQ ID NO: 28 - DNA, 1967 bp, Homo sapiens
  misc_feature (1289)..(1289): n is a, c, g, or t
  misc_feature (1766)..(1766): n is a, c, g, or t
  misc_feature (1915)..(1915): n is a, c, g, or t
  misc_feature (1917)..(1920): n is a, c, g, or t
ggggggggggggcacttggcttcaaagctggctcttggaaattgagcggagagcgacgcggcttgttgtagctgccgctgcggccgccgcggaataataagccgggatctaccatacccattgactaactatggaagattataccaaaatagagaaaattggagaaggtacctatggagttgtgtataagggtagacacaaaactacaggtcaagtggtagccatgaaaaaaatcagactagaaagtgaagaggaaggggttcctagtactgcaattcgggaaatttctctattaaaggaacttcgtcatccaaatatagtcagtcttcaggatgtgcttatgcaggattccaggttatatctcatctttgagtttctttccatggatctgaagaaatacttggattctatccctcctggtcagtacatggattcttcacttgttaagagttatttataccaaatcctacaggggattgtgttttgtcactctagaagagttcttcacagagacttaaaacctcaaaatctcttgattgatgacaaaggaacaattaaactggctgattttggccttgccagagcttttggaatacctatcagagtatatacacatgaggtagtaacactctggtacagatctccagaagtattgctggggtcagctcgttactcaactccagttgacatttggagtataggcaccatatttgctgaactagcaactaagaaaccacttttccatggggattcagaaattgatcaactcttcaggattttcagagctttgggcactcccaataatgaagtgtggccagaagtggaatctttacaggactataagaatacatttcccaaatggaaaccaggaagcctagcatcccatgtcaaaaacttggatgaaaatggcttggatttgctctcgaaaatgttaatctatgatccagccaaacgaatttctggcaaaatggcactgaatcatccatattttaatgatttggacaatcagattaagaagatgtagctttctgacaaaaagtttccatatgttatgtcaacagatagttgtgtttttattgttaactcttgtctatttttgtcttatatatatttctttgttatcaaacttcagctgtacttcgtcttctaatttcaaaaatataacttaaaaatgtaaatattctatatgaatttaaatataattctgtaaatgtgtgtaggtctcactgtaacaactatttgttactataataaaactataatattgatgtcaggaatcaggaaaaaantttgagttggcttaaatcatctcagtccttatggcagttttattttcctgtagttggaactactaaaatttaggaaaatgctaagttcaagtttcgtaatgctttgaagtatttttatgctctgaatgtttaaatgttctcatcagtttcttgccatgttgttaactatacaacctggctaaagatgaatatttttctactggtattttaatttttgacctaaatgtttaagcattcggaatgagaaaactatacagatttgagaaatgatgctaaatttataggagttttcagtaacttaaaaagctaacatgagagcatgccaaaatttgctaagtcttacaaagatcaagggctgtccgcaacagggaagaacagttttgaaaatttatgaactatcttatttttaggtaggttttgaaagctttttgtctaagtgaattcttatgccttggtcagagtaataactgaaggagntgcttatcttggctttcgagtctgagtttaaaactacacattttgacatagtgtttattagcagccatctaaaaaggctctaatgtatatttaactaaaattactagctttgggaattaaactgtttaacaaataaaaaaaaaaaaaanannnntacctataagcagcctaatttgaattatttgctccatctacatagtg

SEQ ID NO: 29 - DNA, 4362 bp, Homo sapiens
  misc_feature (220)..(220): n is a, c, g, or t
  misc_feature (1370)..(1370): n is a, c, g, or t
  misc_feature (1661)..(1661): n is a, c, g, or t
  misc_feature (2814)..(2815): n is a, c, g, or t
  misc_feature (3737)..(3737): n is a, c, g, or t
  misc_feature (3739)..(3742): n is a, c, g, or t
  misc_feature (3744)..(3744): n is a, c, g, or t
  misc_feature (3746)..(3749): n is a, c, g, or t
  misc_feature (3752)..(3752): n is a, c, g, or t
  misc_feature (3913)..(3916): n is a, c, g, or t
  misc_feature (3993)..(3993): n is a, c, g, or t
  misc_feature (4346)..(4346): n is a, c, g, or t
  misc_feature (4350)..(4351): n is a, c, g, or t
gcgagggccgctggggccgcgaagtggggcggccgggtgggctacgagccgggtctgggctgaggggcgcggcttcgcggtggaccccagcccggcaacggaaggcgagctctcctccaccgtccaaagtaaactttgccgctccttccgcggcgctcccgagtcctcgccgccgccgggccgccgcagtccgcgaagagccgtcctgcgtcagggcctncttccctgccccggcgcggggccactgcgccatggacgccacagcactggagcgggacgctgtgcagttcgcccgtctggcggttcagcgcgaccacgaaggccgctactccgaggcggtgttttattacaaggaagctgcacaagccttaatttatgctgagatggcaggatcaagcctagaaaatattcaagaaaaaataactgagtatctggaaagagttcaagctctacattcagcagttcagtcaaagagtgctgatcctttgaagtcaaaacatcagttggacttagagcgtgctcatttccttgttacacaagcttttgatgaagatgaaaaagagaatgttgaagatgctatagaattgtacacagaagctgtggatctctgtctgaaaacatcttatgaaactgctgataaagtcctgcaaaataaactgaaacagttggctcgacaggcactagacagagcagaagcgctgagtgagcctttgaccaagccagttggcaaaatcagttcaacaagtgttaagccaaagccacctccagtgagagcacattttccactgggcgctaatcccttccttgaaagacctcagtcatttataagtcctcagtcatgtgatgcacaaggacagagatacacagcagaagaaatagaagtactcaggacaacatcaaaaataaatggtatagaatatgttcctttcatgaatgttgacctgagagaacgttttgcctatccaatgcctttctgtgatagatggggcaagctaccattatcacctaaacaaaaaactacattttccaagtgggtacgaccagaagacctcaccaacaatcctacaatgatatatactgtgtccagttttagcataaagcagacaatagtatcggattgctcctttgtggcatcactggccatcagtgcagcttatgaaagacgttttaataagaagttaattaccggcataatttaccctcaaaacaaggatggtgaaccagaatacaatccatgtgggaagtatatggtaaaacttcacctcaatggtgtcccaagaaaggtgataattgatgaccagttacctgttgatcacaagggagaattgctctgttcttattccaacaacaaaagtgaattatgggtttcnctcatagaaaaagcatacatgaaagtcatgggaggatatgattttccaggatccaactccaatattgatcttcatgcactgactggctggataccagaaagaattgctatgcattcagatagccaaactttcagtaaggataattctttcagaatgctttatcaaagatttcacaagggagatgtcctcatcactgcgtcaactggaatgatgacagaagctgaaggagagaagtggggtctggttcccacacacgcatatgctgttttggatattagagagttcaagggnctgcgatttatccagttgaaaaatccttggagtcatttacgttggaaaggaagatacagtgaaaatgatgtaaaaaactggactccagagttgcaaaagtatttaaactttgatccccgaacagctcagaaaatagacaacggaatattttggatttcctgggatgatctctgccagtattatgatgtgatttatttgagttggaatccaggtctttttaaagaatcaacatgtattcacagtacttgggatgctaagcaaggacctgtgaaagatgcctatagcctggccaacaacccccagtacaaactggaggtgcagtgtccacaggggggtgctgcagtttgggttttgcttagtagacacataacagacaaggatgattttgcgaataatcgagaatttatcacaatggttgtatacaagactgatgggaaaaaagtttattacccagctgacccacctccatacattgatggaattcgaattaacagccctcattatttgactaagataaagctgaccacacctggcacccatacctttacattagtggtttctcaatatgaaaaacagaacacaatccattacacggttcgggtatattcagcatgcagctttactttttcaaagattccttcaccatacaccttatcaaaacggattaatggaaagtggagtggtcagagtgctggaggatgtggaaatttccaagagactcacaaaaataaccccatctaccaattccatatagaaaagactgggccgttactgattgagctacgaggaccaaggcaatatagcgttggatttgaggttgtaacagtttctactctaggagatcctggtccccatggctttctgaggaaatctagtggtgactataggtgtgggttttgctacctggaattagaaaatataccttctgggatcttcaatatcattcctagtacctttttgcctaaacaagaaggaccttttttcttggactttaatagtattatccccatcaagatcacacaacttcagtgatggagaaatctcaagttactggcttttatacttaccaaacatcagttcttcaaataaggacgcaaatcttcaggacagtaagcagaacaatcagaatggaattaaatctctaaaaacgtgnnacagtggaatctggtgcttgtcagggtgtttggtaagaactgtatatagtcagaattacctaaatcacctagaggtaccgtttacatggttttgtgtatatagagttggcttgcattttaggggccattttgtataaaaagtgcatatgattaaaattagactcagtcatcactgtgagatgcctttgctaagaggataaaggaactgagaccagatgagaaaaagaaaggatatagattccttgagtggaatagtgggctagattaatataccgaaatatttccattgtttcccttttttgcagagcatgtggaagttaaacctgcttgattctactatacatcttgggcaactagttaccaaatgaattgtgccaccataactgattttaattttgcattatttatgattttaaaatatttgttgcccaggtgttatgaaagaataaagcttttaagtatagactaccttagcatgaagatgctcatgcctaagaatgaaaattgttgaggttatctcccattcaatcatgtagcaagaacttaaagaaattcactactgcagtttttatttttaaaaaacagtaattgagatattgaagacattacaatttagtttgtgtggtctttttttaaattgctgtatcgttcagtctcttgtggcaatagcactttgaagaaaatagagaatttaatatatggtgattgggatatgtagcattcaaaaaaagtgaattgccaagatactggtgtcatgtaaattcccactttacataaaaacccatcaggacagaatgatgctcaatattttaaaattctaaaaatagggtgggatttttcattgtctctactttataattatcaaaacttattttgtattgctactaccttaaattgaaataaaatgtttatacttacgganannnnanannnnaanttagatttattgaaagatttcatctgtcgtgtttcatgtaaatgagaacagattatttgcatgaaaatatatacttcaacaaaaatctgttctttaacagagtagtggtagattattacactaatgagatttcactttggtaaatacttcatgctttcagnnnnagcctattaattttaggtggacaaatttaacaagttttctgttactttttaaaaagaaaaaatccagaacataaganctatattatgaacacatgatttgaacctgttgtggtaaagatcttgtacaggatgcaaactaaaaacctaatccctgccatcaaatttattagaagagacctatatatgaacaacttaaaggcactgatttctataatagagctctaaaaacatgccaccagtgtatgaataagggaaagattaattttggctggaccaatataaaaaattgtatttgaagaattgatactttaacttggaccttgaaggtaaagcttcaaaagacaggttactgaccattgagtgtttactatgtacccaatgtgtatatttttctttttaatcttcccaatagctgaataaagtatagatnctannaaaaaaaaaaa

SEQ ID NO: 30 - DNA, 5922 bp, Homo sapiens
gcggccgcggggaccctcggcgtggtcctctgaccctgcaaacccgcgacggaggaaggggaggtcctgcccgaggcgccagcccgaggaggaggatgcccatttaacccgccctcgcctgccgggcgcttgcctcggtgcccgccgccggagcctccgagccgcgcccgtggaagtgctgcatggggcagggctgctgaagcgcggagttcggggtcgcgccgctcccaggcaggcgcgggagcccggtgcggcagttggcacagtttcggcggcgccttctgcgcgggagtggggggcgcggtgcgcccggccggcctccgcggtgccctggtgaggcgagagttatggagccgcccagctgcattcaggatgagccgttcccgcaccccctggagcccgagccgggcgtctcagctcagcccggccccgggaagccaagcgataagcggttccggctgtggtacgttggggggtcgtgcctggaccacaggaccacgctgcctatgctgccctggctcatggccgagatccgcaggcgcagccagaagcccgaggcgggcggctgcggggcgccggcggcccgagaggtgatcctggtgctcagcgcgcccttcctgcgttgcgtccccgcgccgggcgctggggcctcggggggcactagtccgtcggccacgcagcccaacccggcggtattcatcttcgagcacaaggcgcagcatatctcgcgcttcatccacaacagccacgacctcacctactttgcctacctgatcaaggcgcagcccgacgaccccgagtcgcagatggcctgccacgttttccgcgccacagaccccagccaggttcctgatgttattagcagcataaggcaattatctaaagcggccatgaaagaggatgccaaacccagcaaagataatgaggacgccttttacaactctcagaagttcgaagtcctgtactgtggaaaggtgaccgtgacccacaagaaggccccctcaagcctcatcgatgactgcatggagaagttcagcctgcacgaacagcagcgcctgaagatccaaggcgagcagcgcggtccggacccaggagaggacctggctgacttggaggtggtggtgcccgggtcccccggagactgcctgccggaggaggctgacggcaccgacacccaccttggcttacctgccggggccagccagcctgccctgaccagctctcgggtctgcttccctgagcggattttggaagattctggctttgatgagcagcaggagtttcggtctcggtgcagcagtgtcaccggcgtgcaacggagagttcacgagggcagccagaaatcccagccgcgacggagacacgcgagcgcacccagtcacgtccagccctcggactcggagaagaacaggaccatgctcttccaggttgggcgatttgagattaaccttatcagtccagacactaaatcagttgtgctagaaaagaattttaaagatatctcctcttgttctcagggtataaagcatgtggatcactttggctttatctgccgggagtctccagagcctggacttagccagtatatttgttatgtattccagtgtgccagcgaatctctggttgatgaggtaatgctgactctgaaacaggccttcagtacggcggctgccctgcagagtgccaagacgcagattaaactgtgtgaggcctgcccgatgcactctttgcataagctctgtgaaaggattgaaggtctctacccaccaagagccaagctggtgatacagaggcatctctcatcactgacagataatgagcaagctgacatctttgaaagagttcagaaaatgaagccagtcagtgaccaggaagaaaatgaacttgtgattttacacctgaggcagctgtgtgaagccaagcagaagacacacgtgcacatcggggaaggcccttctactatttcaaatagtacaatcccagaaaatgcaacaagcagtggaaggttcaaacttgacattctgaaaaataaagctaagagatccttaactagctccctggaaaatatcttctcaaggggagctaacagaatgagaggtcggcttggaagtgtggacagttttgaacggtccaacagtcttgcttcagagaaggactactcaccaggggattctccaccagggacaccgccagcgtccccaccgtcctcagcttggcaaacgtttcccgaagaggattccgactccccgcagtttcgaagacgggcacacacgttcagccacccaccttcaagcacaaagagaaagctgaatttgcaggatgggagggctcagggtgtgcgttcccctctgctgaggcagagctccagtgaacagtgcagcaatctttcgtcagttcgacgcatgtacaaggagagtaattcttcctccagtcttccaagtcttcacacttccttctctgccccttccttcactgccccctctttcctgaaaagcttttaccagaattcaggtagactgtccccacagtatgaaaatgaaatcagacaagacactgcttcagaatcaagtgatggagaagggagaaaaaggacctcatctacctgcagcaatgagtccctaagtgtgggaggaacctctgtcactcctcgccggatctcctggcggcagcgcattttcctcagggttgcttctcccatgaacaaatctccctcagcaatgcaacagcaagatggattggacaggaacgagctgctgccactgtcccccctctctccaaccatggaggaggaaccgctggttatattcctgtctggggaggatgacccagaaaagattgaagaaagaaagaaatcaaaagaactgaggagcttgtggagaaaagctatacaccaacaaatcttgttacttcgaatggaaaaagaaaaccagaaacttgaaggagcaagcagagatgaactccagtccagaaaagttaaattagactatgaagaagttggtgcatgtcagaaagaggtcttaataacttgggataagaagttgttaaactgcagagctaaaatcagatgtgatatggaagatattcatactcttcttaaagaaggagttcccaaaagtcgacgaggagaaatttggcagtttctggctttacagtaccgactcagacacagattgcctaataaacaacagcctcctgacatatcctataaggaacttttgaagcagctcactgctcagcagcatgcgattctcgtggatttaggaaggacgtttcctactcacccttacttttcagtacagcttgggccaggacagctgtcactgtttaacctcctgaaagcctattctttgctggacaaagaagtgggatactgtcaggggatcagctttgtggctggagtcctgcttctgcacatgagtgaagagcaagcctttgaaatgctgaaattcctcatgtatgacctcggcttccgcaagcagtacagacctgacatgatgtcgctgcagattcaaatgtaccagctgtccaggctccttcatgactatcacagagatctctacaatcaccttgaagaaaatgaaatcagccccagtctttatgctgccccctggttcctcacattgtttgcctctcagttttcattaggatttgtagccagagtttttgatattatttttcttcagggaactgaagttatattcaaggttgcactcagcctactgagcagccaagagacacttataatggaatgtgagagctttgaaaatattgttgagtttcttaaaaacacgctacctgatatgaatacctctgaaatggaaaaaattattacccaggtttttgagatggatatttctaagcagttgcatgcctatgaggtggaatatcatgtgctacaggatgagcttcaggaatcttcatattcctgtgaggatagtgaaactttggagaagctggagagggccaatagccaactgaaaagacaaaacatggacctcctagaaaaattacaggtagctcatactaaaatccaggccttggaatcaaacctggaaaatcttttgacgagagagaccaaaatgaagtctttaatccggaccctggaacaagaaaaaatggcttatcaaaagacagtggagcaactccggaagctgctgcccgcggatgctctagccaattgtgacctgttgctgagagacctaaactgcaaccctaacaacaaagccaagataggaaataagccataattgaagaggcacggcctcagcagaaagtgctccttagaatactacagagaggaagagcctgcatgtcgctggcccaaggctggaccctgaagctgatggaaccacctaatactggtgctgagctcctagtcacagcaggtggacctcgtgctcatcagagcatgccaatcctaagccattggacatatgtagactggtttttgttgttgctatgtacatataaatatatatataaaatgaacatagttcatgctttcagataaaatgagtagatgtatatttagattaatttttttagtcagaacttcatgaaatccacaccaaaggaaaggtaaactgaaatttcccttggacatatgtgaaatctttttgtctttatagtgaaacaaagccagagcatctttgtatattgcaatatacttgaaaaaaatgaatgtatttttttctccaaagaacagcatgtttcactcaatggtgaaaaggtggaaacatttatgtaactttatgtgtatctgtcttgatatctactgacattgtctatatgaggaaaatgattactggtcatgctcctgtgagttttttgggaaggtagggtcatttctccctgcctgctttgtgccaactagcatgttgcatctacatgcattatgagtctggttaggcattactttaaacatacataaagagacagtaggacattgtggctgagtctacccagctcaaggtaaaggagaatgttgctaattttttagcaaactagaccagcattattactcaaactaaaaatatcacacctgaaaaatttaatttaggacctaaaatgtctagattagctttctgctttttttatttgaataactcattcagttgtgaatgaattcctctttatttggtgccacagtcaccaaatgacaaggatttgccactttcccaccaaattgtgagtgcttgtaatttaggtctctctaccttaaattcagtataaggaaacgtaattatgattgattttttccaaagatgacaagctgtgttgaaatacattttttcttttgaccaattgacagaatctaataagctttaataatcttccccttttatgtgaaaagttttgagaactgtgaaatgtttaggaacaaactgttgaaatccattggaagggaaaaaagaaagtggtaccagtgttaccagctcaactaaaacctgcaattctgcatttcaactcttcacttcctcagcctacaaatagctcattagatgacattcacgcatgctgggtataggcaaggaaagtaattttcaaagtacatttgcagttctctttttcagagatgattctatgatagtgcctctgaaagttgatgcagcatttttgcctttccaaaaagtatttatcctcactgctttttgcagtacttgtattttcacagatggattatctggggtaattttcttcaaagggagtttgttatacacagtgaaaatgtattatagagtagaatagtaaagctctaggggtttcagaaagctttgatgaacagatgacaaacatctgaaaccccctccgcactgttacccagtgtgtatataatgacttgttatagctcagtgtgcccttgaatccatacagtttcttaaaagacaataaaatcttattaataaagttaatgtaacttct

SEQ ID NO: 31 - DNA, 3286 bp, Homo sapiens
tagcagcgaatatactttacaccaaatctcagaagattcagaacttagatgagtggggcccaggacaggaaccctggagccttggaaggaggggagccccatctccccagaagagcagtgaccccagcagagaggggcctggtgtatcactggaggaaatagcctgccaaggaatacacgtcttcagaagaaattctgtgtggcttcaagagactgatcaaattgtgagaggaaaacagcctacccggtcctcttttcttcaatacaaaatgagataataggggttggaaggaaaaccttcaagacctatggaagtcagttgcagccagctcatcacatagaggtgcaggtgaggtgtattttcatcacggtggaaaattctggctgcttcatctccatctctagagccaatattggagcttttcaataaaagctatggcctcaaccaccagcaccaagaagatgatggaggaagccacctgctccatctgcctgagcctgatgacgaacccagtaagcatcaactgtggacacagctactgccacttgtgtataacagacttctttaaaaacccaagccaaaagcaactgaggcaggagacattctgctgtccccagtgtcgggctccatttcatatggatagcctccgacccaacaagcagctgggaagcctcattgaagccctcaaagagacggatcaagaaatgtcatgtgaggaacacggagagcagttccacctgttctgcgaagacgaggggcagctcatctgctggcgctgtgagcgggcaccacagcacaaagggcacaccacagctcttgttgaagacgtatgccagggctacaaggaaaagctccagaaagctgtgacaaaactgaagcaacttgaagacagatgtacggagcagaagctgtccacagcaatgcgaataactaaatggaaagagaaggtacagattcagagacaaaaaatccggtctgactttaagaatctccagtgtttcctacatgaggaagagaagtcttatctctggaggctggagaaagaagaacaacagactctgagtagactgagggactatgaggctggtctggggctgaagagcaatgaactcaagagccacatcctggaactggaggaaaaatgtcagggctcagcccagaaattgctgcagaatgtgaatgacactttgagcaggagttgggctgtgaagctggaaacatcagaggctgtctccttggaacttcatactatgtgcaatgtttccaagctttacttcgatgtgaagaaaatgttaaggagtcatcaagttagtgtgactctggatccagatacagctcatcacgaactaattctctctgaggatcggagacaagtgactcgtggatacacccaggagaatcaggacacatcttccaggagatttactgccttcccctgtgtcttgggttgtgaaggcttcacctcaggaagacgttactttgaagtggatgttggcgaaggaaccggatgggatttaggagtttgtatggaaaatgtgcagaggggcactggcatgaagcaagagcctcagtctggattctggaccctcaggctgtgcaaaaagaaaggctatgtagcacttacttctcccccaacttcccttcatctgcatgagcagcccctgcttgtgggaatttttctggactatgaggccggagttgtatccttttataacgggaatactggctgccacatctttactttcccgaaggcttccttctctgatactctccggccctatttccaggtttatcaatattctcctttgtttctgcctcccccaggtgactaaggaaaagagcagaagctccttggtttaaccagcacagagaaaataatataaatcccataagggcagacgtttggtctgttttcttcgctgtcatttccttagtagttagactagtgctgagattttagtggatatataattgatttatgttgaatatatggacttagcaactaaaaataccacagatggttaacctggactggggcaaagcaagataatagtgatgatcgtatgttgctgtctccatccgtctttaatgggtcagggctttgatttccaagggtcttcaggtgatgagtaggggtacccacaagtcagaaggtctgcgttctcctagtttgtttgctgccatttgaactcatgtagggaatgaaagaaagctgcaattatccgccaactgcatttaaaacaaaacaaaacagaaaaatcaaaataacattgactcttccaaccactgacatgttgtttaataatctaagcggcagtcctggaggctaccagacttactgagttctacctgagaaacagccaagcaaagtgtgagagaagggttaagactggcttacaatgagatgcttcaaatgaaaagggaattatgagtaaaattgaactttgatgggggattcagttctggaaaagaatttggtattttccagtctgctaggaccaattaccttgaaatattttaaaatctcagtaaatagttattgctgaaatggctgttggcagttcttattatgattcagagaagagcaaatagaccttaacttcattttgaaaaagaccaaattaccatacccgagtgagtaatgacaggactacaactaaaacataaacaacattaatgatgaccataaaaagtcacaaaattgctaaatgttataatttagagttgacataaaaattgatggccaggcatggtggctcacgcctgtaatcccagaactatgtgaggctgaggcaggtggatcacttgaggtcaggagttcaacaccagcctggccaacatggtgaaaccctgtctctactaaaaatacaaaaattagccgggcatggtggtaggggcctgtaacccagctactcgtgaggccaaggcaggagaattgcttgagcctgcagcagctgcagtaagccaagatcatgctgtgcctcaaggaaaaaaaaaattaatgtttactgatatttgttgaagtcctacaacatcacctctgagaataggagaaatgaagcaacagttgtgtctagatgtcagaggcatggctgggcctccatctctgcctaagggagatataaaagagttcaaactattgcccatgttccccagggtcagaagttctaattatgatgatagaggctgggttgtaagtagtaagtgaagggtagcagaatatgccatctttggcataagaagtattttgagttgaagacaattgagaaaaaaaaaaaaaaaaaa

SEQ ID NO: 32 - DNA, 6179 bp, Homo sapiens
  misc_feature (2597)..(2597): n is a, c, g, or t
  misc_feature (2678)..(2678): n is a, c, g, or t
  misc_feature (2934)..(2934): n is a, c, g, or t
  misc_feature (3578)..(3578): n is a, c, g, or t
  misc_feature (3601)..(3601): n is a, c, g, or t
  misc_feature (3605)..(3605): n is a, c, g, or t
  misc_feature (3620)..(3620): n is a, c, g, or t
  misc_feature (3631)..(3631): n is a, c, g, or t
  misc_feature (3635)..(3635): n is a, c, g, or t
  misc_feature (3644)..(3644): n is a, c, g, or t
  misc_feature (3653)..(3653): n is a, c, g, or t
  misc_feature (3659)..(3659): n is a, c, g, or t
  misc_feature (3673)..(3673): n is a, c, g, or t
  misc_feature (3676)..(3677): n is a, c, g, or t
  misc_feature (3682)..(3682): n is a, c, g, or t
  misc_feature (3759)..(3759): n is a, c, g, or t
  misc_feature (3797)..(3797): n is a, c, g, or t
  misc_feature (3841)..(3841): n is a, c, g, or t
  misc_feature (3928)..(3928): n is a, c, g, or t
  misc_feature (4019)..(4019): n is a, c, g, or t
  misc_feature (4054)..(4054): n is a, c, g, or t
  misc_feature (4062)..(4062): n is a, c, g, or t
  misc_feature (4119)..(4121): n is a, c, g, or t
  misc_feature (4123)..(4124): n is a, c, g, or t
  misc_feature (4209)..(4209): n is a, c, g, or t
  misc_feature (4214)..(4214): n is a, c, g, or t
  misc_feature (4834)..(4834): n is a, c, g, or t
  misc_feature (4836)..(4836): n is a, c, g, or t
  misc_feature (5246)..(5246): n is a, c, g, or t
  misc_feature (5248)..(5248): n is a, c, g, or t
  misc_feature (5255)..(5255): n is a, c, g, or t
  misc_feature (5298)..(5298): n is a, c, g, or t
  misc_feature (5300)..(5301): n is a, c, g, or t
  misc_feature (5303)..(5305): n is a, c, g, or t
  misc_feature (5308)..(5310): n is a, c, g, or t
  misc_feature (5312)..(5313): n is a, c, g, or t
  misc_feature (5315)..(5316): n is a, c, g, or t
  misc_feature (5623)..(5623): n is a, c, g, or t
  misc_feature (5627)..(5627): n is a, c, g, or t
  misc_feature (6066)..(6066): n is a, c, g, or t
  misc_feature (6164)..(6164): n is a, c, g, or t
  misc_feature (6172)..(6172): n is a, c, g, or t
ctttttttggccgggccgcatgaatccggccagcccaccctgcttgaaggacctacaggtttgtctcttccagatcagaactgaggaacaaaaacccccatcctgggaaaaatggggaagctgatttcgccgggttgcttttgtcttgcgggctcctgtcgggttcggtgtttccgctctgaagactgcgacgcgggctccgatgcagctcgctccctgccggatgggtcatgggattctaaacatgaggcagatagctgatcagcttccttgggttttgctgatgacacaagagagctttgcctgaagatggaaacactggagtcagaactgacctgccctatttgtctggagctctttgaggaccctcttctactgccctgcgcacacagcctctgcttcaactgcgcccaccgcatcctagtatcacactgtgccaccaacgagtctgtggagtccatcaccgccttccagtgccccacctgccggcatgtcatcaccctcagccagcgaggtctagacgggctcaagcgcaacgtcaccctacagaacatcatcgacaggttccagaaagcatcagtgagcgggcccaactctcccagcgagacccgtcgggagcgggcctttgacgccaacaccatgacctccgccgagaaggtcctctgccagttttgtgaccaggatcctgcccaggacgctgtgaagacctgtgtcacttgtgaagtatcctactgtgacgagtgcctgaaagccactcacccgaataagaagccctttacaggccatcgtctgattgagccaattccggactctcacatccgggggctgatgtgcttggagcatgaggatgagaaggtgaatatgtactgtgtgaccgatgaccagttaatctgtgccttgtgtaaactggttgggcggcaccgcgatcatcaggtggcagctttgagtgagcgctatgacaaattgaagcaaaacttagagagtaacctcaccaaccttattaagaggaacacagaactggagacccttttggctaaactcatccaaacctgtcaacatgttgaagtcaatgcatcacgtcaagaagccaaattgacagaggagtgtgatcttctcattgagatcattcagcaaagacgacagattattggaaccaagatcaaagaagggaaggtgatgaggcttcgcaaactggctcagcagattgcaaactgcaaacagtgcattgagcggtcagcatcactcatctcccaagcggaacactctctgaaggagaatgatcatgcgcgtttcctacagactgctaagaatatcaccgagagagtctccatggcaactgcatcctcccaggttctaattcctgaaatcaacctcaatgacacatttgacacctttgccttagatttttcccgagagaagaaactgctagaatgtctggattaccttacagctcccaaccctcccacaattagagaagagctctgcacagcttcatatgacaccatcactgtgcattggacctccgatgatgagttcagcgtggtctcctacgagctccagtacaccatattcaccggacaagccaacgtcgttagtctgtgtaattcggctgatagctggatgatagtacccaacatcaagcagaaccactacacggtgcacggtctgcagagcggcaccaagtacatcttcatggtcaaggccatcaaccaggcgggcagccgcagcagtgagcctgggaagttgaagacaaacagccaaccatttaaactggatcccaaatctgctcatcgaaaactgaaggtgtcccatgataacttgacagtagaacgtgatgagtcatcatccaagaagagtcacacacctgaacgcttcaccagccaggggagctatggagtagctggaaatgtgtttattgatagtggccggcattattgggaagtggtcataagtggaagcacatggtatgccattggtcttgcttacaaatcagccccgaagcatgaatggattgggaagaactctgcttcctgggcgctctgccgctgcaacaataactgggtggtgagacacaatagcaaggaaatccccattgagcctgccccccacctccggcgcgtgggcatcctgctggactatgataacggctctatcgccttttatgatgctttgaactccatccacctctacaccttcgacgtcgcatttgcgcagcctgtttgccccaccttcaccgtgtggaacaagtgtctgacgattatcactgggctccctatcccagaccatttggactgcacagagcagctgccgtgagcgtctggccacatggagctgctttctggggaacagtaaggttcaggccactatttaggggactgagaaagcacaggcttcatgagtgtaatgaaatctcaccagaagtgtcccgaaatcggctcagatagggctcaaaacaagagattcctctccttttactgtgtcttgtattaagtacgggctttaataatttctttaatttttttgtatttagaggaaaatctatagattatttataagagaaacataatcaggattacaacttttaggaattacttggntttgcacattaagaggcccataagtttatcagctatttacaaccttcatttcatcacaatctgtgggcttacaaaaaaacnaaaaacttttgtagttttgtatgttactcatcttcttacctgatatcccatgatgatcccatggtaggtcttctcacctcgatggtgcataacaggatgtgtttgaacctagtaggggaggaaacaggctttcttactctggtttaatttgaagtgttttaattgtgatgtcaaaaagttgtatcagatcaactaaaatggagagcaagacagagaatgaaaagagttgattttggacctcggaccttgccgtggntaaatctttaccttctcatagctgatgggataatgttggaaagaaaggttctgaatcctttggccacattttgccctgcttctctcagggttaagggttctggaagaacattaagaatgagattgcaattgaaaatagtcattttgaatcctattgattattcaaaaattcaggctgatttgtcttttatcagaggtaggattctgttttatagtatagaatctactttatcccttccttttaatagttcctttagacctgtgaaatttcttcactacatttaatagttctcctatttcccgctcccccatatcaattttccttttgtctccggggctgagtaaataaacatgttctgtcacaaatagcagcaccactttggattgattttgctctccaggacatcagcacatggccctgatcagcactaccacatccaaacataagtcactgaaaaacacttaatatttatgagttggtaatgacaagggacattgtataaagtactatttgctagattcatgcctcaaaagttattataaacagacctttattaaacacatcttgaaagatgtagaagtccctctatagtctagtatagtttacaatagagttgtaagaccaaaaaaaaaaaaaaaaaaaantcaaactcgttattcaggaaccntgcnttataaaatgtcagntgggattcttngcantgccaatcntgatgcgtnggaatnggtccatgaattanggnnttctntgagcagttcttggcccagaactctggcattggttctagtttgatgaagggcatgacctctataaatggtttcaatngctaaaatatttacctgggatactgggtcagccatttngactgagcagactagtggatttagacattgtttttagttatttngtttttaaccaaatcaaccaactgcctccctgaaataagtcaatgaactcattgtttcagcatcacgtggccaaaggtcatgtgatngcaaatctggatttcaagggaggccaagccagcttcctgggtccttccatcctcttccctagcagacactctcctttttcttaacagatangattctatatatttactatattatttatacccagnatgaatantttgatagatacctaagacaatttcacatctaaaagatggacgcctcaatggaaaannnannatctttctctggaaaccttataggtttttctttttattacaatataaaagcaatgtgtgtttgccttctctgagtaaactgaaangggtngtctcagtaatttttacatacattttgggtaactggataatggatattttaatgcactttgtacactaacaggttctaaataaaagggtctaaaactcagcttctgagtttttaaaatcacggtctccaggtaccaataaatgctacagtttgccttatgatgttaacataaaacacttagtagaaggacaatatttccatgaaaataatgtttttcaatattaagaagttactactcaaattttcacagtaagccatttagggtatgtttggctatttttataaggacatgagagattatgtcataattttgttgtggaagtctcactcttggctaacttaaaagcattgtggatagtagcagttactagttccaggttgtcatatttacaggaaaatatgtatatggtgaaaggccaccgtgtttaattactataatgatgtagaaaagattcccgtgtgaattttttttttgaaagtctaaaaaatgtatgctgtaaaaatttgctgcagtgtaattttgcattctctttaaactgattgaggtcacagtattttattatttggggtcctcaccacaggaaacactgcgatacaggggcaaaagagatggcagtgcnanttaaattaatacaacaaaatcaatgcagcaccaaccaagactgccaggtctggtgtcatgggtatgcccagagcccaggagttcagaagggccctaagcctgatttaatgctctgctgttgatgtcttgaaattcttaacaatttttgaacaaggggcctgcgttttcacttcgcactgggccttgcaaattacatagcgagtgctcataaaagaactcagaaacgtggtacctctcttcctggtggatacaaataaagaaatctggatccaaagttgaaagttgctggcgatatcattcaagtaggactctaaatagtggattaagatgagggtgggcctgggtgaagattctttccagctttaaaagaaagtgacttcaaaaactgactgcaaatattgacgatggtntntgctggnggaaaagaaacagcttgaatacagacaggcttttttattacgntnntnnnatnnngnncnnaaacttgctgaggaactgaactaacgtcctccagtgaccgtggaattccatctcagctccaggaacatgcagatacctgcaaagagacacgcatatatgctggcatacatgtgcatttggtgttgggaagttgaccatctggtctatcttaataaaatggtaaaaagcacaccaagacaatgatgggggcaggaggatgtttttgaaaacagcgcttctcaaccagtgctcgattttgccccccaggagacatttggcaatgcaatggcaacttttggttgtcgcagccggggaagggaagctaccnagcnatctagtgcgtagaggtcatggacgccgttaaacatcctacagtgcaagcgcagcccccgaccacgaagagttgtcttgctcaaatatcaacagtgctgcagtgtagaaacttgatcgttggttttcttttaatgcaaaactctcataaaaacctttcacttttcctgtcattgattatatgcttgatacacccaaaaagaaaaggggaggggcaccaattcacctacactccagtggctccatcacctttaaaaatatttataaaatagttccaaaaatctgatatctgaaaagcaatccaagcctgtgtaaatgggaatcactgataagtatcatcatctgtatcagcttggcttggacatgaaaaattgattctctttatgtcactccttgcacctggacaaattcaatccccggtacttaagtcacactgccaanccctcggccctgactattgtcttgattgctgttcctttctggttcaaaataaaatcatttttgtggcaccaagaaaaaaaaaaaaaaaaaaaaaaaanaaaaaaanaaaaaaa

SEQ ID NO: 33 - DNA, 1963 bp, Homo sapiens
cgaacacctccaacatgaagcttcttcatgttttcctgttatttctgtgcttccacttaaggttttgcaaggtcacttatacatctcaagaggatctggtggagaaaaagtgcttagcaaaaaaatatactcacctctcctgcgataaagtcttctgccagccatggcagagatgcattgagggcacctgtgtttgtaaactaccgtatcagtgcccaaagaatggcactgcagtgtgtgcaactaacaggagaagcttcccaacatactgtcaacaaaagagtttggaatgtcttcatccagggacaaagtttttaaataacggaacatgcacagccgaaggaaagtttagtgtttccttgaagcatggaaatacagattcagagggaatagttgaagtaaaacttgtggaccaagataagacaatgttcatatgcaaaagcagctggagcatgagggaagccaacgtggcctgccttgaccttgggtttcaacaaggtgctgatactcaaagaaggtttaagttgtctgatctctctataaattccactgaatgtctacatgtgcattgccgaggattagagaccagtttggctgaatgtacttttactaagagaagaactatgggttaccaggatttcgctgatgtggtttgttatacacagaaagcagattctccaatggatgacttctttcagtgtgtgaatgggaaatacatttctcagatgaaagcctgtgatggtatcaatgattgtggagaccaaagtgatgaactgtgttgtaaagcatgccaaggcaaaggcttccattgcaaatcgggtgtttgcattccaagccagtatcaatgcaatggtgaggtggactgcattacaggggaagatgaagttggctgtgcaggctttgcatctgtggctcaagaagaaacagaaattttgactgctgacatggatgcagaaagaagacggataaaatcattattacctaaactatcttgtggagttaaaaacagaatgcacattcgaaggaaacgaattgtgggaggaaagcgagcacaactgggagacctcccatggcaggtggcaattaaggatgccagtggaatcacctgtgggggaatttatattggtggctgttggattctgactgctgcacattgtctcagagccagtaaaactcatcgttaccaaatatggacaacagtagtagactggatacaccccgaccttaaacgtatagtaattgaatacgtggatagaattattttccatgaaaactacaatgcaggcacttaccaaaatgacatcgctttgattgaaatgaaaaaagacggaaacaaaaaagattgtgagctgcctcgttccatccctgcctgtgtcccctggtctccttacctattccaacctaatgatacatgcatcgtttctggctggggacgagaaaaagataacgaaagagtcttttcacttcagtggggtgaagttaaactaataagcaactgctctaagttttacggaaatcgtttctatgaaaaagaaatggaatgtgcaggtacatatgatggttccatcgatgcctgtaaaggggactctggaggccccttagtctgtatggatgccaacaatgtgacttatgtctggggtgttgtgagttggggggaaaactgtggaaaaccagagttcccaggtttttacaccaaagtggccaattattttgactggattagctaccatgtaggaaggccttttatttctcagtacaatgtataaaattgtgatctctctcttcattctattctttttctctcaagagttccatttaatggaaataaaacggtataattaataattctctaggggggaaaaatgaagcaaatctcattggatatttttaaaggtctccacagagtttatgccatattggaattttgttgtataattctcaaataaatattttggtgaagcat

SEQ ID NO: 34 - DNA, 3057 bp, Homo sapiens
  misc_feature (4)..(4): n is a, c, g, or t
  misc_feature (49)..(51): n is a, c, g, or t
  misc_feature (53)..(53): n is a, c, g, or t
  misc_feature (55)..(57): n is a, c, g, or t
  misc_feature (59)..(60): n is a, c, g, or t
  misc_feature (63)..(64): n is a, c, g, or t
  misc_feature (66)..(68): n is a, c, g, or t
  misc_feature (71)..(71): n is a, c, g, or t
  misc_feature (73)..(73): n is a, c, g, or t
  misc_feature (590)..(590): n is a, c, g, or t
  misc_feature (737)..(737): n is a, c, g, or t
  misc_feature (1796)..(1796): n is a, c, g, or t
  misc_feature (1881)..(1881): n is a, c, g, or t
  misc_feature (2032)..(2032): n is a, c, g, or t
  misc_feature (2042)..(2042): n is a, c, g, or t
  misc_feature (2076)..(2076): n is a, c, g, or t
  misc_feature (2149)..(2149): n is a, c, g, or t
  misc_feature (2169)..(2169): n is a, c, g, or t
  misc_feature (2273)..(2273): n is a, c, g, or t
  misc_feature (2284)..(2284): n is a, c, g, or t
  misc_feature (2287)..(2287): n is a, c, g, or t
  misc_feature (2295)..(2295): n is a, c, g, or t
  misc_feature (2315)..(2315): n is a, c, g, or t
  misc_feature (2328)..(2328): n is a, c, g, or t
  misc_feature (2456)..(2456): n is a, c, g, or t
  misc_feature (2553)..(2553): n is a, c, g, or t
gcgnccgcggcacgagtcatgactcagtcgactgccaaagcaatgaagnnncntnnngnngcnncnnnagncntggcctttccccctggtgctcttcatcctttaccaaagagacaagcacttgaaaaaagcaatggtaccagcgcggtctttaaccccagcgtcttgcactaccagcaggctctcaccagcgcacagttgcagcaacacgccgcgttcattccaacagataattctgaaataatcagcagaaacggaatggaatgccaagaatctgcattgagaataactaaacattgttactgtacatactatcctgtttcctcctcaatagaattgccacaaactgcatgctaaataaagatgtagttcttctggacagaccacaactctaagaagctagtgctgctatctcatatatgagtattaaatatggtatgcttagtatattccaacctaagatagttaactacctgagaccagctgtgatgtttaaagacataaaggataaagtttacttttaaagggtttctaaacatagtttctgtcctaggaatattgtcttatctccataactatagctgatgcanaaagtccagccagtttactcatttcgattcagaatatttcaaatttagcaataaacaattagcattagttaaaaaagaaacatattccaagggcaggttcgattctagctctaattactgtcatgtcatttacccactggatcaaanggtatgtttcacttcttgacaatataaatgctgcagcaaagatgagaggtgaagtaaaaccgatacctgtcctgcaggtctaaaatttgaatggaaattcaagcacaagtactggggacacatcaaagtgtggtgtttggtttgcctggagatgccacgttgaatcatgtgattctagattaacattaaatagattgaaaaagaaactttgcacggtatgagcttcataccccaccaaacaaagtcttgaaggtattattttacaagtatatttttaaagttgttttataagagagactttgtagaagtgcctagattttgccagacttcatccagcttgacaagattgagaggcccatgccaacagtctaatctaagagattagtctttcaaactcaccatccagttgcctgttacagaataactcttcttaactaaaaacctagtcaaacaaggaagctgtaggtgaggagatctgtataatattctaatttaagtaagtttgagtttagtcactgcaaatttgactgtgactttaatctaaattactatgtaaacaaaaagtagatagtttcactttttaaaaaatccattactgttttgcatttcaaaagttggattaaagggttgtaactgactacagcatggaaaaaaatagttcttttaattctttcaccttaaagcatattttatgtctcaaaagtataaaaaactttaatacaagtacatacatattatatatacacatacatatatatactatatatggatgaaacatattttaatgttgtttacttttttaaatacttggttgatcttcaaggtaatagcgatacaattaaattttgttcagaaagtttgttttaaagtttattttaagcactatcgtaccaaatatttcatatttcacattttatatgttgcacatagcctatacagtacctacatagtttttaaattattgtttaaaaaacaaaacagctgttataaatgaatattatgtgtaattgtttcaaacatccattttctttgtgaacatattagtgattgaagtatttngacttttgagattgaatgtaaaatattttaaatttgggatcatcgcctgttctgaaaactagatgcaccaaccgtatcattattngtttgaggaaaaaaagaaatctgcattttaattcatgttggtcaaagtcgaattactatctatttatcttatatcgtagatctgataaccctatctaaaagaaagtcacacgctaaatgtattcttacatagtgcttgtatcgttgcattngttttaattngtggaaaagtattgtatctaacttgtattacttnggtagtttcatctttatgtattattgatatttgtaattttctcaactataacaatgtagttacgctacaactntgcctaaaacattcaaactntgttttcttttttctgtttttttctttgttaattcatttaaactcattgaaaacatagtatacattactaaaaggtaaattatgggaatcactgaaatattttngtagattaatngtngtaacatngtctttcttttttttctttngtttcatgatttngatttttaaaattattagcacacaactattttcagccctttaataatggagcatcaaaaacatcacctgtaaccccaagcaaatatagaagactgtattttttactatgatatccattttccagaatngtgattacaatatgcaaagagtcataaatatgccatttacaataaggaggaggcaaggcaaatgcatagatgtacaaatatatgtacaacagatttngctttttatttatttataatgtaattttatagaataattctgggatttgagaggatctaaaactatttttctgtataaatattatttgccaaaagtttgtttatattcagaagtctgactatgatgaataaatcttaaatgctttgtttaattaaaaaacaaaaatcaccaatatccaagacatgaagatatcagttcaacaaatactgtagttaagagactaactctccacttgtatgggaactacatttcactcttggttttcaggatataacagcacttcaccgaaatattctttcagccataccactggtaacatttctactaaatctttctgtaacacttaaagaattccctcattcattaccttacagtgtaaacaggagtctaatttgtatcaatactatgttttggttgtaatattcagttcactcacccaatgtacaaccaatgaaataaaagaagcatttaaaaggaaaaaaaaaaaaaaaaaaaaaaaaaaaa

SEQ ID NO: 35 - DNA, 2745 bp, Homo sapiens
  misc_feature (32)..(32): n is a, c, g, or t
  misc_feature (36)..(36): n is a, c, g, or t
  misc_feature (49)..(49): n is a, c, g, or t
  misc_feature (740)..(740): n is a, c, g, or t
  misc_feature (1489)..(1490): n is a, c, g, or t
  misc_feature (1577)..(1577): n is a, c, g, or t
  misc_feature (1600)..(1602): n is a, c, g, or t
  misc_feature (1612)..(1613): n is a, c, g, or t
  misc_feature (1655)..(1655): n is a, c, g, or t
  misc_feature (2300)..(2300): n is a, c, g, or t
  misc_feature (2337)..(2337): n is a, c, g, or t
  misc_feature (2351)..(2351): n is a, c, g, or t
  misc_feature (2353)..(2353): n is a, c, g, or t
  misc_feature (2517)..(2517): n is a, c, g, or t
  misc_feature (2532)..(2532): n is a, c, g, or t
  misc_feature (2538)..(2539): n is a, c, g, or t
  misc_feature (2554)..(2554): n is a, c, g, or t
  misc_feature (2580)..(2580): n is a, c, g, or t
  misc_feature (2582)..(2582): n is a, c, g, or t
  misc_feature (2661)..(2661): n is a, c, g, or t
  misc_feature (2674)..(2674): n is a, c, g, or t
  misc_feature (2696)..(2696): n is a, c, g, or t
  misc_feature (2706)..(2706): n is a, c, g, or t
  misc_feature (2715)..(2715): n is a, c, g, or t
  misc_feature (2734)..(2736): n is a, c, g, or t
  misc_feature (2741)..(2742): n is a, c, g, or t
gtcttggatatttatctgtaagtgagccgttngggnaggattgaatacngagacgctgtctgcttgctgccttaagacagctagctgaattgctgattaacttttaaaatacccagcttggtttatttttcttagaatctgttgctaagactggggacgctgttttcttttacaaagggaaatctaagttaatttcaaggcattcgaaatggggaaagactattattgcattttgggaattgagaaaggagcttcagatgaagatattaaaaaggcttaccgaaaacaagccctcaaatttcatccggacaagaacaaatctcctcaggcagaggaaaaatttaaagaggtcgcagaagcttatgaagtattgagtgatcctaaaaagagagaaatatatgatcagtttggggaggaagggttgaaaggaggagcaggaggtactgatggacaaggaggtaccttccggtacacctttcatggcgatcctcatgctacatttgctgcatttttcggagggtccaacccctttgaaattttctttggaagacgaatgggtggtggtagagattctgaagaaatggaaatagatggtgatccttttagtgcctttggtttcagcatgaatggatatccaagagacaggaattctgtggggccatcccgcctcaaacaagatcctccagttattcatgaacttagagtatcacttgaagagatatatagtggttgtaccaaancggatgaagatttctcgaaaaaggctaaacgctgatggaaggagttacagatctgaggacaaaattcttaccattgagattaaaaaagggtggaaagaaggcaccaaaattacttttccaagagaaggagatgaaacaccaaatagtattccagcagacattgtttttatcattaaagacaaagatcatccaaaatttaaaagggatggatcaaatataatttatactgctaaaattagtttacgagaggcattgtgtggctgctcaattaatgtaccaacactggatggaagaaacatacctatgtcagtaaatgatattgtgaaacccggaatgaggagaagaattattggatatgggctgccatttccaaaaaatcctgaccaacgtggtgaccttctaatagaatttgaggtgtccttcccagatactatatcttcttcatccaaagaagtacttaggaaacatcttcctgcctcatagaatgaagaactttgttacacatattttgataaggcactgaaaatataaaaggactggtagtttactgatgtagatgtgaattctgtataaagatgtgtaaattcttttgagggttcattaaattgcatgaatagagacgggtcaaataaataggcaaaagggatttttacagttagagataaaagagaaaaccattcactgtattttatttcatttctcctgattcagatatttttagtaatttgcttatatgtaaaagttgtttnngtggagtcagtggatatatttctaatgaagtgctagactatccaattacttaatttcttatacctttagataatcagtatgaaaagnttcccatttataatggaaatgannnttcttaactnnactatacatgtaatatgtatttctagaagagaataaaaaccnaagtcagttattagatttaaatcaccttctgaaatgctgctatagggctggtatctgtaaaagaatatcctgatgcatctgtttcaccattttgatttttaaagtatgctgtagcatttcttaataacatcgttgtgatgttcttaaggcagatctttcttcataaaaaggaaagtaatggcaatttctctcctgtggaaatcccaattgcttgaattactgatattttagaatagactttttaaaatgccatatgtaattttatgcaagttgactatatatcttgtacttaataaattataggctcattttgttctctgctagtttaaagtaattcgtttaataatagatgtgtttttagaggaaatgctgttacttggaattaattttccagttatacagtcttctataacttactaataatattctatatgtactttatgtaatttccctaaaaagaatgaactaccactacactatggtgttaaaccaaaatatagggaaaataaacactaactgctgcttatggataatgttgcaactacttgttatgcatataaatattttactttttcacatgtatagattgcatttcttaggtgttttaattttttaaatatatttatgttttaaaaatttagtttngttttctgttttataactatagtgagaatgatgtttngaagcaaaattttngnttataaaatagttttcaggattatatatatatatactggatcctatcgccttttagtagaatatgaaatattcttttagaaatccaatataaataggttataatagccatattctttattactttattgagatataatttacatgccataaagtttacccttanaatatataattcagnggtttnnagtgatatttacaangtggtacaatcatcatcactttctantnccagaatattttcatcaccccaaaaagaaatcctaaatccattagcagttacttcccattcttcccttcctccagcccntgaaaacactacnatctacttttcatctgtatggntttgtctgtnctggacatntcacataaatagactcaannnatatnnctt

SEQ ID NO: 36 - DNA, 1504 bp, Homo sapiens
tgcagacggaacttcagccgctgcctctgttctcagcgtcagtgccgccactgcccccgccagagcccaccggccagcatgtcctctgctcacttcaaccgaggccctgcctacgggctgtcagccgaggttaagaacaagctggcccagaagtatgaccaccagcgggagcaggagctgagagagtggatcgagggggtgacaggccgtcgcatcggcaacaacttcatggacggcctcaaagatggcatcattctttgcgaattcatcaataagctgcagccaggctccgtgaagaagatcaatgagtcaacccaaaattggcaccagctggagaacatcggcaacttcatcaaggccatcaccaagtatggggtgaagccccacgacatttttgaggccaacgacctgtttgagaacaccaaccatacacaggtgcagtccaccctcctggctttggccagcatggcgaagacgaaaggaaacaaggtgaacgtgggagtgaagtacgcagagaagcaggagcggaaattcgagccggggaagctaagagaagggcggaacatcattgggcttcagatgggcagcaacaagtttgccagccagcagggcatgacggcctatggcacccggcgccacctctacgaccccaagctgggcacagaccagcctctggaccaggcgaccatcagcctgcagatgggcaccaacaaaggagccagccaggctggcatgactgcgccagggaccaagcggcagatcttcgagccggggctgggcatggagcactgcgacacgctcaatgtcagcctgcagatgggcagcaacaagggcgcctcgcagcggggcatgacggtgtatgggctgccacgccaggtctacgaccccaagtactgtctgactcccgagtacccagagctgggtgagcccgcccacaaccaccacgcacacaactactacaattccgcctaggtccacaaggccttcactgttttccccccaagggaggctgctgctgctcttggctggagccagccagggccagccgaccccctctccctgcatggcatcctccagcccctgtagaactcaacctctacagggttagagtttggagagagcagactggcggggggcccattggggggaaggggaccctccgctctgtagtgctacagggtccaacatagaacagggtgtccccaacagcgcccaaaggacgcactgagcaacgctattccagctgtccccccactccctcacaagtgggtacccccaggaccagaagctcccccagcaaagcccccagagcccaggctcggcctgcccccaccccattcccgcagtgggagcaaactgcatgcccagagacccagcggacacacgcggtttggtttgcagcgactggcatactatgtggatgtgacagtggcgtttgtaatgagagcactttcttttttttctatttcactggagcacaataaatggctgtaaaatctacacg

SEQ ID NO: 37 - DNA, 1248 bp, Homo sapiens
gacagcctcgcttggacgcagagcccggcccgacgccgccatgagcgccgcgctcttcagcctggacggcccggcgcgcggcgcgccctggcctgcggagcctgcgcccttctacgaaccgggccgggcgggcaagccgggccgcggggccgagccaggggccctaggcgagccaggcgccgccgcccccgccatgtacgacgacgagagcgccatcgacttcagcgcctacatcgactccatggccgccgtgcccaccctggagctgtgccacgacgagctcttcgccgacctcttcaacagcaatcacaaggcgggcggcgcggggcccctggagcttcttcccggcggccccgcgcgccccttgggcccgggccctgccgctccccgcctgctcaagcgcgagcccgactggggcgacggcgacgcgcccggctcgctgttgcccgcgcaggtgggcccgtgcgcacagaccgtggtgagcttggcggccgcagggcagcccaccccgcccacgtcgccggagccgccgcgcagcagccccaggcagacccccgcgcccggccccgcccgggagaagagcgccggcaagaggggcccggaccgcggcagccccgagtaccggcagcggcgcgagcgcaacaacatcgccgtgcgcaagagccgcgacaaggccaagcggcgcaaccaggagatgcagcagaagttggtggagctgtcggctgagaacgagaagctgcaccagcgcgtggagcagctcacgcgggacctggccggcctccggcagttcttcaagcagctgcccagcccgcccttcctgccggccgccgggacagcagactgccggtaacgcgcggccggggcgggagagactcagcaacgacccatacctcagacccgacggcccggagcggagcgcgccctgccctggcgcagccagagccgccgggtgcccgctgcagtttcttgggacataggagcgcaaagaagctacagcctggacttaccaccactaaactgcgagagaagctaaacgtgtttattttcccttaaattatttttgtaatggtagctttttctacatcttactcctgttgatgcagctaaggtacatttgtaaaaagaaaaaaaaccagacttttcagacaaaccctttgtattgtagataagaggaaaagactgagcatgctcacttttttatattaatttttacagtatttgtaagaataaagcagcatttgaaatcgc

SEQ ID NO: 38 - DNA, 1705 bp, Homo sapiens
gggcggcggcgcgcgggtgcgatcgcggagctgtgaggcgcaggcagggctctggggcacctagagaccggggccggagacgtggcagccgccctgcccgccagaaagtttcctagaagtttgctgggcgcgggcgcacgactgactggctggaccatgaacgtgttccgaatcctcggcgacctgagccacctcctggccatgatcttgctgctggggaagatctggaggtccaagtgctgcaagggcatctctgggaagagccagatcctgtttgctctcgtcttcaccaccaggtacctggacctgttcaccaacttcatctccatctacaacacagtaatgaaggtggtttttctcctctgtgcctatgttacagtgtacatgatatatgggaaattccgtaaaacttttgacagtgagaatgacacattccgcctggagtttcttctggtcccagtcattggcctttccttccttgaaaactacagtttcactctgctggagatcctctggactttctctatctatctggaatcagtggctatcctgccccagctcttcatgatcagcaagactggagaggctgagaccataactactcactacctgttctttctgggtctgtaccgggcactctacctggctaactggatcaggcggtaccagactgagaatttctatgaccaaattgcagtcgtgtctggagtagtacaaaccatcttctactgtgacttcttctacttgtatgtgaccaaagtccttaagggaaagaagttaagtcttccaatgccaatctgaggaccttcagagacagtctacgccttaacaagcacatgaaggaaactattttgaatgttctctttggcaacttatccataatttgggatcaaatgttaaaaccagaaaagtgtttagtgtggatttcagcaaaacctgatcatcccacccagaagaccttctcatcaatagatcgcccttaaagacccattgtaaggtcataaaaaacctcggccacctgcacaaagatggtgcctcactgcaacaagaaaccttaaggtgtcttaccgacgaaataaaaaacataaatgattgttctccaaggcctgagggcaagactcatgatgagcaagtcaaccccaatctggaacaatgtccctcctcttagaatgtcccaactaaagaccagttaaaatattagggtacgttcttgtgaatttccactttccaggtagatgaccaaatttaggtggtcaagatataaaggtgtcagctagttttaagtgtgaaacttatttcactttcacactgccttcaggccagaagcaaaccaaatttaccaggtttggctggaggagttttgtgactcatcttttactggtttgaattttttcaaaccagtggctgatacctgccttgtacttagtaccttaataccaataacctaatggtacttaggcgagtaccatttgcacaatcactgttttacttatgagcagatacagatatatccaaacccttacctactaggtatcctgctagggttttcaattccaattcttgtattaagttttttcctttcagttttaggtgcgaaagtaatcagtcaatccaatatcccccatctttgtcttgaaacaaaaactgttttaagacgtctacgttgaattattcagagaattaagcaataaaagctcacacctta

SEQ ID NO: 39 - DNA, 3025 bp, Homo sapiens
gcacgagcaggcagttcagattaaagaagctaattgatcaagaaatcaagtctcaggaggagaaggagcaagaaaaggagaaaagggtcaccaccctgaaagaggagctgaccaagctgaagtcttttgctttgatggtggtggatgaacagcaaaggctgacggcacagctcacccttcaaagacagaaaatccaagagctgaccacaaatgcaaaggaaacacataccaaactagcccttgctgaagccagagttcaggaggaagagcagaaggcaaccagactagagaaggaactgcaaacgcagaccacaaagtttcaccaagaccaagacacaattatggcgaagctcaccaatgaggacagtcaaaatcgccagcttcaacaaaagctggcagcactcagccggcagattgatgagttagaagagacaaacaggtctttacgaaaagcagaagaggagctgcaagatataaaagaaaaaatcagtaagggagaatatggaaacgctggtatcatggctgaagtggaagagctcataaaaatggaggagcagtgcagagatctcaataagaggcttgaaagggagacgttacagagtaaagactttaaactagaggttgaaaaactcagtaaaagaattatggctctggaaaagttagaagacgctttcaacaaaagcaaacaagaatgctactctctgaaatgcaatttagaaaaagaaaggatgaccacaaagcagttgtctcaagaactggagagtttaaaagtaaggatcaaagagctagaagccattgaaagtcggctagaaaagacagaattcactctaaaagaggatttaactaaactgaaaacattaactgtgatgtttgtagatgaacggaaaacaatgagtgaaaaattaaagaaaactgaagataaattacaagctgcttcttctcagcttcaagtggagcaaaataaagtaacaacagttactgagaagttaattgaggaaactaaaagggcgctcaagtccaaaaccgatgtagaagaaaagatgtacagcgtaaccaaggagagagatgatttaaaaaacaaattgaaagcggaagaagagaaaggaaatgatctcctgtcaagagttaatatgttgaaaaataggcttcaatcattggaagcaattgagaaagatttcctaaaaaacaaattaaatcaagactctgggaaatccacaacagcattacaccaagaaaacaataagattaaggagctctctcaagaagtggaaagactgaaactgaagctaaaggacatgaaagccattgaggatgacctcatgaaaacagaagatgaatatgagactctagaacgaaggtatgctaatgaacgagacaaagctcaatttttatctaaagagctagaacatgttaaaatggaacttgctaagtacaagttagcagaaaagacagagaccagccatgaacaatggcttttcaaaaggcttcaagaagaagaagctaagtcagggcacctctcaagagaagtggatgcattaaaagagaaaattcatgaatacatggcaactgaagacctaatatgtcacctccagggagatcactcagtctgcaaaaaaaaactaaatcaacaagaaaacaggaacagagatttaggaagagagattgaaaacctcactaaggagttagagaggtaccggcatttcagtaagagcctcaggcctagtctcaatggaagaagaatttccgatcctcaagtattttctaaagaagttcagacagaagcagtagacaatgaaccacctgattacaagagcctcattcctctggaacgtgcagtcatcaatggtcagttatatgaggagagtgagaatcaagacgaggaccctaatgatgagggatctgtgctgtccttcaaatgcagccagtctactccatgtcctgttaacagaaagctatggattccctggatgaaatccaaggagggccatcttcagaatggaaaaatgcaaactaaacccaatgccaactttgtgcaacctggagatctagtcctaagccacacacctgggcagccacttcatataaaggttactccagaccatgtacaaaacacagccactcttgaaatcacaagtccaaccacagagagtcctcactcttacacgagtactgcagtgataccgaactgtggcacgccaaagcaaaggataaccatcctccaaaacgcctccataacaccagtaaagtccaaaacctctaccgaagacctcatgaatttagaacaaggcatgtccccaattaccatggcaacctttgccagagcacagaccccagagtcttgtggttctctaactccagaaaggacaatgtccctattcaggttttggctgtgactggttcagctagctctcctgagcagggacgctccccagaaccaacagaaatcagtgccaagcatgcgatattcagagtctccccagaccggcagtcatcatggcagtttcagcgttcaaacagcaatagctcaagtgtgataactactgaggataataaaatccacattcacttaggaagtccttacatgcaagctgtagccagcccttcagcaccactgcaggataaccgaactcaaggcttaattaacggggcactaaacaaaacaaccaataaagtcaccagcagtattactatcacaccaacagccacacctcttcctcgacaatcacaaattacagtaagtaatatatataactgaccacgctcaccctcatccagtccatactgatatttttgcaaggaactcaatccttttttaatcatccctccatatcccccaagactgactgaactcgtactttgggaaggtttgtgcatgaactatacaagagtatctgaaactaactgttgcctgcatagtcatatcgagtgtgcacttactgtatatcttttcatttacatacttgtatggaaaatatttagtctgcacttgtataaatacatctttatgtatttgaaaaaaaaaaaa

SEQ ID NO: 40 - DNA, 1594 bp, Homo sapiens
gcccgccggtccacgccgcgcaccgctccgagggccagcgccacccgctccgcagccggcaccatgcgcgagatcgtgcacatccaggcgggccagtgcggcaaccagatcggcgccaagttttgggaggtcatcagcgatgagcatgggatcgaccccacaggcagttaccatggagacagtgacttgcagctggagagaatcaacgtgtactacaatgaggctgctggtaacaaatatgtacctcgggccatcctggtggatctggagcctggcaccatggactctgtcaggtctggacccttcggccagatcttcagaccagacaacttcgtgttcggccagagtggagccgggaataactgggccaagggccactacacagagggagccgagctggtcgactcggtcctggatgtggtgaggaaggagtcagagagctgtgactgtctccagggcttccagctgacccactctctggggggcggcacggggtccgggatgggcaccctgctcatcagcaagatccgggaagagtacccagaccgcatcatgaacaccttcagcgtcatgccctcacccaaggtgtcagacacggtggtggagccctacaacgccaccctctcggtccaccagctggtggaaaacacagatgaaacctactccattgataacgaggccctgtatgacatctgcttccgcaccctgaagctgaccacccccacctacggggacctcaaccacctggtgtcggccaccatgagcggggtcaccacctgcctgcgcttcccgggccagctgaacgcagacctgcgcaagctggcggtgaacatggtgcccttccctcgcctgcacttcttcatgcccggcttcgcgcccctgaccagccggggcagccagcagtaccgggcgctcacggtgcccgagctcacccagcagatgttcgactccaagaacatgatggccgcctgcgacccgcgccacggccgctacctgacggtggctgccatcttccggggccgcatgtccatgaaggaggtggacgagcagatgctcaacgtgcagaacaagaacagcagctacttcgtggagtggatccccaacaacgtgaagacggccgtgtgcgacatcccgccccgcggcctgaagatgtcggccaccttcatcggcaacagcacggccatccaggagctgttcaagcgcatctccgagcagttcacggccatgttccggcgcaaggccttcctgcactggtacacgggcgagggcatggacgagatggagttcaccgaggccgagagcaacatgaacgacctggtgtccgagtaccagcagtaccaggacgccacggccgacgaacaaggggagttcgaggaggaggagggcgaggacgaggcttaaaaacttctcagatcaatcgtgcatccttagtgaacttctgttgtcctcaagcatggtctttctacttgtaaactatggtgctcagttttgcctctgttagaaattcacactgttgatgtaatgatgtggaactcctctaaaaattacagtattgtctgtgaaggtatctatactaataaaaaagcatgtgtag

SEQ ID NO: 41 - DNA, 1698 bp, Homo sapiens
tcggcacaggagcgaggagacccgagagcagacgcgccctggcgcccgccctgcgcagtcaccatggcgatgcatttcatcttctcagatacagcggtgcttctgtttgatttctggagtgtccacagtcctgctggcatggccctttcggtgttggtgctcctgcttctggctgtactgtatgaaggcatcaaggttggcaaagccaagctgctcaaccaggtactggtgaacctgccaacctccatcagccagcagaccatcgcagagacagacggggactctgcaggctcagattcattccctgttggcagaacccaccacaggtggtacttgtgtcactttggccagtctctaatccatgtcatccaggtggtcatcggctacttcatcatgctggccgtaatgtcctacaacacctggattttccttggtgtggtcttgggctctgctgtgggctactacctagcttacccacttctcagcacagcttagatggtgaggaacgtgcaggcactgaggctggagggacatggagccccctcttccagacactatacttccaactgccctttcttctgatggctattcctccaccttattcccagcccctggaaactttgagctgaagccagcacttgctccctggagttcggaagccattgcagcaaccttccttctcagccagcctacgtagggcccaggcatggtcttgtgtcttaagacagctgctgtgaccaaagggagaatggagataacaggggtggcagggttactgagcccatgacaatgcttctctgtgactcaaaccaggaatttccaaagatttcaagccagggagaagggttcttggtgatgcagggcatggaacctggacaccctcagctctcctgctttgtgccttatctacaggagcatcgcccattggacttcctgacctcttctgtctttgagggacagagaccaagctagatcctttttctcacctttctgcctttggaacacatgaagatcatctcgtctatggatcatgttgacaaactaagttttttttatttttcccattgaactcctagttggcaattttgcacattcatacaaaaaaatttttaatgaaatgatttcattgattcatgatggatggcagaaactgctgagacctatttccctttcttggggagagaataagtgacagctgattaaaggcagagacacaggactgctttcaggctcctggtttattctctgattgactgagctccttccaccagaaggcactgcctgcaggaagaagatgatctgatggccgtgggtgtctgggaagctcttcgtggcctcaatgccctcctttatcctcatctttcttctatgcagaacaaaaagctgcatctaataatgttcaatacttaatattctctatttattacttactgcttactcgtaatgatctagtggggaaacatgattcattcacttaaaatactgattaagccatgggcaggtactgactgaagatgcaatccaaccaaagccattacattttttgagttagatgggactctctggatagttgaacctcttcactttataaaaaaggaaagagagaaaatcactgctgtatactaaatacctcacagattagatgaaaagatggttgtaagctttgggaattaaaaacaaatacattttagtaaatat

SEQ ID NO: 42 - DNA, 1757 bp, Homo sapiens
ggccgcggcggcagggcggggccggagcagcgggcggcggcggaggcggcgcccgggagcgctcttcgcttccctcggggtcttgctcggacctcggccaccgcctgggatccccaggactcgtgcgtgcagcatgggcggcgtcggggagccgggaccgcgggagggacccgcgcagccgggggcaccgctgcccaccttctgctgggagcagatccgcgcgcacgaccagcccggcgacaagtggctggtcatcgagcgccgcgtctacgacatcagccgctgggcacagcggcacccagggggcagccgcctcatcggccaccacggcgctgaggacgccacggatgccttccgtgccttccatcaagatctcaattttgtgcgcaagttcctacagcccctgttgattggagagctggctccggaagaacccagccaggatggacccctgaatgcgcagctggtcgaggacttccgagccctgcaccaggcagccgaggacatgaagctgtttgatgccagtcccaccttctttgctttcctactgggccacatcctggccatggaggtgctggcctggctccttatctacctcctgggtcctggctgggtgcccagtgccctggccgccttcatcctggccatctctcaggctcagtcctggtgtctgcagcatgacctgggccatgcctccatcttcaagaagtcctggtggaaccacgtggcccagaagttcgtgatggggcagctaaagggcttctccgcccactggtggaacttccgccacttccagcaccacgccaagcccaacatcttccacaaagacccagacgtgacggtggcgcccgtcttcctcctgggggagtcatccgtcgagtatggcaagaagaaacgcagatacctaccctacaaccagcagcacctgtacttcttcctgatcggcccgccgctgctcaccctggtgaactttgaagtggaaaatctggcgtacatgctggtgtgcatgcagtgggcggatttgctctgggccgccagcttctatgcccgcttcttcttatcctacctccccttctacggcgtccctggggtgctgctcttctttgttgctgtcagggtcctggaaagccactggttcgtgtggatcacacagatgaaccacatccccaaggagatcggccacgagaagcaccgggactgggtcagctctcagctggcagccacctgcaacgtggagccctcacttttcaccaactggttcagcgggcacctcaacttccagatcgagcaccacctcttccccaggatgccgagacacaactacagccgggtggccccgctggtcaagtcgctgtgtgccaagcacggcctcagctacgaagtgaagcccttcctcaccgcgctggtggacatcgtcaggtccctgaagaagtctggtgacatctggctggacgcctacctccatcagtgaaggcaacacccaggcgggcagagaagggctcagggcaccagcaaccaagccagccccggcgggatcgatacccccacccctccactggccagcctgggggtgccctgcctgccctcctggtactgttgtcttcccctcggccccctcacatgtgtattcagcagccctatggccttggctctgggcctgatgggacaggggtagagggaaggtgagcatagcacattttcctagagcgagaattgggggaaagctgttatttttatattaaaatacattcagatgt

SEQ ID NO: 43 - DNA, 9487 bp, Homo sapiens
  misc_feature (122)..(122): n is a, c, g, or t
  misc_feature (340)..(340): n is a, c, g, or t
  misc_feature (1086)..(1086): n is a, c, g, or t
  misc_feature (1088)..(1091): n is a, c, g, or t
  misc_feature (1093)..(1093): n is a, c, g, or t
  misc_feature (1095)..(1102): n is a, c, g, or t
  misc_feature (1619)..(1619): n is a, c, g, or t
  misc_feature (1622)..(1622): n is a, c, g, or t
  misc_feature (1625)..(1625): n is a, c, g, or t
  misc_feature (1627)..(1627): n is a, c, g, or t
  misc_feature (1629)..(1629): n is a, c, g, or t
  misc_feature (1633)..(1633): n is a, c, g, or t
  misc_feature (1732)..(1732): n is a, c, g, or t
  misc_feature (1752)..(1752): n is a, c, g, or t
  misc_feature (1956)..(1956): n is a, c, g, or t
  misc_feature (3556)..(3556): n is a, c, g, or t
  misc_feature (3584)..(3584): n is a, c, g, or t
  misc_feature (3587)..(3587): n is a, c, g, or t
  misc_feature (3592)..(3592): n is a, c, g, or t
  misc_feature (3595)..(3595): n is a, c, g, or t
  misc_feature (3605)..(3605): n is a, c, g, or t
  misc_feature (3657)..(3657): n is a, c, g, or t
  misc_feature (3679)..(3679): n is a, c, g, or t
  misc_feature (3735)..(3736): n is a, c, g, or t
  misc_feature (3739)..(3741): n is a, c, g, or t
  misc_feature (3743)..(3747): n is a, c, g, or t
  misc_feature (3751)..(3752): n is a, c, g, or t
  misc_feature (3754)..(3755): n is a, c, g, or t
  misc_feature (3757)..(3761): n is a, c, g, or t
  misc_feature (3765)..(3765): n is a, c, g, or t
  misc_feature (3769)..(3771): n is a, c, g, or t
  misc_feature (3774)..(3774): n is a, c, g, or t
  misc_feature (3777)..(3777): n is a, c, g, or t
  misc_feature (3782)..(3784): n is a, c, g, or t
  misc_feature (4133)..(4133): n is a, c, g, or t
  misc_feature (4246)..(4246): n is a, c, g, or t
  misc_feature (4304)..(4304): n is a, c, g, or t
  misc_feature (4312)..(4312): n is a, c, g, or t
  misc_feature (4452)..(4452): n is a, c, g, or t
  misc_feature (4684)..(4684): n is a, c, g, or t
  misc_feature (4981)..(4982): n is a, c, g, or t
  misc_feature (5781)..(5781): n is a, c, g, or t
  misc_feature (6034)..(6034): n is a, c, g, or t
  misc_feature (6221)..(6221): n is a, c, g, or t
  misc_feature (6531)..(6531): n is a, c, g, or t
  misc_feature (6533)..(6533): n is a, c, g, or t
  misc_feature (7372)..(7372): n is a, c, g, or t
  misc_feature (7700)..(7700): n is a, c, g, or t
  misc_feature (7729)..(7729): n is a, c, g, or t
  misc_feature (8373)..(8373): n is a, c, g, or t
  misc_feature (8510)..(8510): n is a, c, g, or t
  misc_feature (8513)..(8516): n is a, c, g, or t
  misc_feature (8518)..(8518): n is a, c, g, or t
  misc_feature (8520)..(8522): n is a, c, g, or t
  misc_feature (8524)..(8524): n is a, c, g, or t
  misc_feature (8526)..(8532): n is a, c, g, or t
  misc_feature (9470)..(9472): n is a, c, g, or t
tcctctccctcctccttcttctcgctgagtctcctcctcggctctgacggtacagtgatataatgatgatgggtgtcacaacccgcatttgaacttgcaggcgagctgccccgagcctttcnggggaagaactccaggcgtgcggacgcaacagccgagaacattaggtgttgtggacaggagctgggaccaagatcttcggccagccccgcatcctcccgcatcttccagcaccgtcccgcaccctccgcatccttccccgggccaccacgcttcctatgtgacccgcctgggcaacgccgaacccagtcgcgcagcgctgcagtgaattttccccccnaactgcaataagccgccttccaaggccaagatgttcataaatataaagagcatcttatggatgtgttcaaccttaatagtaacccatgcgctacataaagtcaaagtgggaaaaagcccaccggtgaggggctccctctctggaaaagtcagcctaccttgtcatttttcaacgatgcctactttgccacccagttacaacaccagtgaatttctccgcatcaaatggtctaagattgaagtggacaaaaatggaaaagatttgaaagagactactgtccttgtggcccaaaatggaaatatcaagattggtcaggactacaaagggagagtgtctgtgcccacacatcccgaggctgtgggcgatgcctccctcactgtggtcaagctgctggcaagtgatgcgggtctttaccgctgtgacgtcatgtacgggattgaagacacacaagacacggtgtcactgactgtggatggggttgtgtttcactacagggcggcaaccagcaggtacacactgaattttgaggctgctcagaaggcttgtttggacgttggggcagtcatagcaactccagagcagctctttgctgcctatgaagatggatttgagcagtgtgacgcaggctggctggctgatcagactgtcagatatcccatccgggctcccagagtaggctgttatggagataagatgggaaaggcaggagtcaggacttatggattccgttctccccaggaaacttncnnnntntnnnnnnnngtggatcatctggatggtgatgtgttccacctcactgtccccagtaaattcaccttcgaggaggctgcaaaagagtgtgaaaaccaggatgccaggctggcaacagtgggggaactccaggcggcatggaggaacggctttgaccagtgcgattacgggtggctgtcggatgccagcgtgcgccaccctgtgactgtggccagggcccagtgtggaggtggtctacttggggtgagaaccctgtatcgttttgagaaccagacaggcttccctccccctgatagcagatttgatgcctactgctttaaacgtcgaatgagtgatttgagtgtaattggtcatccaatagattcagaatctaaagaagatgaaccttgtagtgaagaaacagatccagtgcatgatctaatggctgaaattttacctgaattccctgacataattgaaatagacctataccacagtgaagaaaatgaagaagaagaagaagagtgtgcaaatgctactgatgtgacanccnccncntntgtncagtacataaatgggaagcatctcgttaccactgtgcccaaggacccagaagctgcagaagctaggcgtggccagtttgaaagtgttgcaccttctcanaatttctcggacagctctgnaagtgatactcatccatttgtaatagccaaaacggaattgtctactgctgtgcaacctaatgaatctacagaaacaactgagtctcttgaagttacatggaagcctgagacttaccctgaaacatcagaacatttttcaggtggtgagcctgatgttttccccacagtcccattccatgaggaatttgaaagtggaacagccanaaaaggggcagaatcagtcacagagagagatactgaagttggtcatcaggcacatgaacatactgaacctgtatctctgtttcctgaagagtcttcaggagagattgccattgaccaagaatctcagaaaatagcctttgcaagggctacagaagtaacatttggtgaagaggtagaaaaaagtacttctgtcacatacactcccactatagttccaagttctgcatcagcatatgtttcagaggaagaagcagttaccctaataggaaatccttggccagatgacctgttgtctaccaaagaaagctgggtagaagcaactcctagacaagttgtagagctctcagggagttcttcgattccaattacagaaggctctggagaagcagaagaagatgaagatacaatgttcaccatggtaactgatttatcacagagaaatactactgatacactcattactttagacactagcaggataatcacagaaagcttttttgaggttcctgcaaccaccatttatccagtttctgaacaaccttctgcaaaagtggtgcctaccaagtttgtaagtgaaacagacacttctgagtggatttccagtaccactgttgaggaaaagaaaaggaaggaggaggagggaactacaggtacggcttctacatttgaggtatattcatctacacagagatcggatcaattaattttaccctttgaattagaaagtccaaatgtagctacatctagtgattcaggtaccaggaaaagttttatgtccttgacaacaccaacacagtctgaaagggaaatgacagattctactcctgtctttacagaaacaaatacattagaaaatttgggggcacagaccactgagcacagcagtatccatcaacctggggttcaggaagggctgaccactctcccacgtagtcctgcctctgtctttatggagcagggctctggagaagctgctgccgacccagaaaccaccactgtttcttcattttcattaaacgtagagtatgcaattcaagccgaaaaggaagtagctggcactttgtctccgcatgtggaaactacattctccactgagccaacaggactggttttgagtacagtaatggacagagtagttgctgaaaatataacccaaacatccagggaaatagtgatttcagagcgattaggagaaccaaattatggggcagaaataaggggcttttccacaggttttcctttggaggaagatttcagtggtgactttagagaatactcaacagtgtctcatcccatagcaaaagaagaaacggtaatgatggaaggctctggagatgcagcatttagggacacccagacttcaccatctacagtacctacttcagttcacatcagtcacatatctgactcagaaggacccagtagcaccatggtcagcacttcagccttcccctgggaagagtttacatcctcagctgagggctcaggtgagcaactggtcacagtcagcagctctgttgttccagtgcttcccagtgctgtgcaaaagttttctggtacagcttcctccattatcgacgaaggattgggagaagtgggnactgtcaatgaaattgatagaagatccnccnttttnccnacagcagaangtggaaggtacgaaagctccagtagagaaggaggaagtaaaggtcagtggcncagtttcaacaaactttccccnaactatagagccagccaaattatggtctaggcaagaagtcaaccctgtaagacaannaannnannnnnaaannanntnnnnngaanaaannnaanaanaaaannnatttgaatcccctcaaaactctcctgcaacagaacaaacaatctttgattcacagacatttactgaaactgaactcaaaaccacagattattctgtactaacaacaaagaaaacttacagtgatgataaagaaatgaaggaggaagacacttctttagttaacatgtctactccagatccagatgcaaatggcttggaatcttacacaactctccctgaagctactgaaaagtcacattttttcttagctactgcattagtaactgaatctataccagctgaacatgtagtcacagattcaccaatcaaaaaggaagaaagtacaaaacattttccgaaaggcatgagnccaacaattcaagagtcagatactgagctcttattctctggactgggatcaggagaagaagttttacctactctaccaacagagtcagtgaattttactgaagtggaacaaancaataacacattatatccccacacttctcaagtggaaagtacctcaagtgacaaaatngaagactntaacagaatggaaaatgtggcaaaagaagttggaccactcgtatctcaaacagacatctttgaaggtagtgggtcagtaaccagcacaacattaatagaaattttaagtgacactggagcagaaggacccacggtggcancctctccctttctccacggacatcggacatcctcaaaatcagactgtcaggtgggcagaagaaatccagactagtagaccacaaaccataactgaacaagactctaacaagaattcttcaacagcagaaattaacgaaacaacaacctcatctactgattttctggctagagcttatggttttgaaatggccaaagaatttgttacatcagcaccaaaaccatctgacttgnattatgaaccttctggagaaggatctggagaagtggatattgttgattcatttcacacttctgcaactactcaggcaaccagacaagaaagcagcaccacatttgtttctgatgggtccctggaaaaacatcctgaggtgccaagcgctaaagctgttactgctgatggattcccaacagtttcagtgatgctgcctcttcattcagagcagaacaaaagctcccctgatccaactagcacactgtcaaatacagtgtcatatgagaggtccacagacggtagtttccaagaccgtnncagggaattcgaggattccaccttaaaacctaacagaaaaaaacccactgaaaatattatcatagacctggacaaagaggacaaggatttaatattgacaattacagagagtaccatccttgaaattctacctgagctgacatcggataaaaatactatcatagatattgatcatactaaacctgtgtatgaagacattcttggaatgcaaacagatatagatacagaggtaccatcagaaccacatgacagtaatgatgaaagtaatgatgacagcactcaagttcaagagatctatgaggcagctgtcaacctttctttaactgaggaaacatttgagggctctgctgatgttctggctagctacactcaggcaacacatgatgaatcaatgacttatgaagatagaagccaactagatcacatgggctttcacttcacaactgggatccctgctcctagcacagaaacagaattagacgttttacttcccacggcaacatccctgccaattcctcgtaagtctgccacagttattccagagattgaaggaataaaagctgaagcaaaagccctggatgacatgtttgaatcaagcactttgtctgatggtcaagctattgcagaccaaagtgaaataataccaacattgggccaatttgaaaggactcaggaggagtatgaagacaaaaaacatgctggtccttcttttcagccagaattctcttcaggagctgaggaggcattagtagaccatactccctatctaagtattgctactacccaccttatggatcangagtgtaacagaggtgcctgatgtgatggaaggatccaatcccccatattacactgatacaacattagcagtttcaacatttgcgaagttgtcttctcagacaccatcatctcccctcactatctactcaggcagtgaagcctctggacacacagagatcccccagcccagtgctctgccaggaatagacgtcggctcatctgtaatgtccccacaggattcttttaaggaaattcatgtaaatattgaagcnactttcaaaccatcaagtgaggaataccttcacataactgagcctccctctttatctcctgacacaaaattagaaccttcagaagatgatggtaaacctgagttattagaagaaatggaagcttctcccacagaacttattgctgtggaaggaactgagattctccaagatttccaaaacaaaaccnatggtcaagtttctggagaagcaatcaagatgtttcccaccattaaaacacctgaggctggaactgttattacaactgccgatgaaattgaattagaaggtgctacacagtggccacactctacttctgcttctgccacctatggggtcgaggcaggtgtggtgccttggctaagtccacagacttctgagaggcccacgctttcttcttctccagaaataaaccctgaaactcaagcagctttaatcagagggcaggattccacgatagcagcatcagaacagcaagtggcagcgagaattcttgattncnatgatcaggcaacagtaaaccctgtggaatttaatactgaggttgcaacaccaccattttcccttctggagacttctaatgaaacagatttcctgattggcattaatgaagagtcagtggaaggcacggcaatctatttaccaggacctgatcgctgcaaaatgaacccgtgccttaacggaggcacctgttatcctactgaaacttcctacgtatgcacctgtgtgccaggatacagcggagaccagtgtgaacttgattttgatgaatgtcactctaatccctgtcgtaatggagccacttgtgttgatggttttaacacattcaggtgcctctgccttccaagttatgttggtgcactttgtgagcaagataccgagacatgtgactatggctggcacaaattccaagggcagtgctacaaatactttgcccatcgacgcacatgggatgcagctgaacgggaatgccgtctgcagggtgcccatctcacaagcatcctgtctcacgaagaacaaatgtttgttaatcgtgtgggccatgattatcagtggataggcctcaatgacaagatgtttgagcatgacttccgttggactgatggcagcacactgcaatacgagaattggagacccaaccagccagacagcttcttttctgctggagaagactgtgttgtaatcatttggcatgagaatggccagtggaatgatgttccctgcaattaccatctcacctatacgtgcaagaaaggaacagttgcttgcggccagccccctgttgtagaaaatgccaagacctttggaaagatgaaacctcgttatgaaatcaactccctnattagataccactgcaaagatggtttcattcaacgtcaccttccaactatccggtgcttaggaaatggaagatgggctatacctaaaattacctgcatgaacccatctgcataccaaaggacttattctatgaaatactttaaaaattcctcatcagcaaaggacaattcaataaatacatccaaacatgatcatcgttggagccggaggtggcaggagtcgaggcgctgatccctaaaatggcgaacatgtgttttcatcatttcagccaaagtcctaacttcctgtgcctttcctatcacctcgagaagtaattatcagttggttnggatttttggaccaccgttcagtcatttngggttgccgtgctcccaaaacattttaaatgaaagtattggcattcaaaaagacagcagacaaaatgaaagaaaatgagagcagaaagtaagcatttccagcctatctaatttctttagttttctatttgcctccagtgcagtccatttcctaatgtataccagcctactgtactatttaaaatgctcaatttcagcaccgatggccatgtaaataagatgatttaatgttgattttaatcctgtatataaaataaaaagtcacaatgagtttgggcatatttaatgatgattatggagccttagaggtctttaatcattggttcggctgcttttatgtagtttaggctggaaatggtttcacttgctctttgactgtcagcaagactgaagatggcttttcctggacagctagaaaacacaaaatcttgtaggtcattgcacctatctcagccataggtgcagtttgcttctacatgatgctaaaggctgcgaatgggatcctgatggaactaaggactccaatgtcgaactcttctttgctgcattcctttttcttcacttacaagaaaggcctgaatggaggacttttctgtaaccaggaacattttttaggggtcaaagtgctaataattaactcaaccnaggtctactttttaatggctttcataacactaactcataaggttaccgatcaatgcatttcatacggatatagacctagggctctggagggtgggggattgttaaaacacatgcaaaaaaaaaaaaaaaaaaaaaanaannnntntnnntntnnnnnnnttaatcttttataaagttttgaatgttcatgtatgaaatgctgcagctgtgaagcatacataaataaatgaagtaagccatactgatttaatttattggatgttattttccctaagacctgaaaatgaacatagtatgctagttatttttcagtgttagccttttactttcctcacacaatttggaatcatataatataggtactttgtccctgattaaataatgtgacggatagaatgcatcaagtgtttattatgaaaagagtggaaaagtatatagcttttagcaaaaggtgtttgcccattctaagaaatgagcgaatatatagaaatagtgtgggcatttcttcctgttaggtggagtgtatgtgttgacatttctccccatctcttcccactctgttttctccccattatttgaataaagtgactgctgaagatgactttgaatccttatccacttaatttaatgtttaaagaaaaacctgtaatggaaagtgagactccttccctaatttcagtttagagcaacttgaagaagagtagacaaaaaataaaatgcacatagaaaaagagaaaaagggcacaaagggattggcccaatattgattcttttttataaaacctcctttggcttagaaggaatgactctagctacaataatacacagtatgtttaagcaggttcccttggttgttgcattaaatgtaatccacctttaggtattttagagcacagaacaacactgtgttgatctagtaggtttctatttttcctttctctttacaatgcacataatactttcctgtatttatatcataacgtgtatagtgtaaaatgtgaatgactttttttgtgaatgaaaatctaaaatctttgtaactttttatatctgcttttgtttcaccaaagaaacctaaaatccttcttttactacannnaaaaaaaaaaagggc

SEQ ID NO: 44 - DNA, 1658 bp, Homo sapiens
aagctgggagggaagaagaaagggaggggaggggagaatcgaggacggacggcctagccaggccaagaatgcaattgccccggtggtgggagctgggagacccctgtgcttggacgggacagggtcgggggacacgcaggatgagccccgcgaccactggcacattcttgctgacagtgtacagtattttctccaaggtacactccgatcggaatgtatacccatcagcaggtgtcctctttgttcatgttttggaaagagaatattttaagggggaatttccaccttacccaaaacctggcgagattagtaatgatcccataacatttaatacaaatttaatgggttacccagaccgacctggatggcttcgatatatccaaaggacaccatatagtgatggagtcctatatgggtccccaacagctgaaaatgtggggaagccaacaatcattgagataactgcctacaacaggcgcacctttgagactgcaaggcataatttgataattaatataatgtctgcagaagacttcccgttgccatatcaagcagaattcttcattaagaatatgaatgtagaagaaatgttggccagtgaggttcttggagactttcttggcgcagtgaaaaatgtgtggcagccagagcgcctgaacgccataaacatcacatcggccctagacaggggtggcagggtgccacttcccattaatgacctgaaggagggcgtttatgtcatggttggtgcagatgtcccgttttcttcttgtttacgagaagttgaaaatccacagaatcaattgagatgtagtcaagaaatggagcctgtaataacatgtgataaaaaatttcgtactcaattttacattgactggtgcaaaatttcattggttgataaaacaaagcaagtgtccacctatcaggaagtgattcgtggagaggggattttacctgatggtggagaatacaaacccccttctgattctttgaaaagcagagactattacacggatttcctaattacactggctgtgccctcggcagtggcactggtcctttttctaatacttgcttatatcatgtgctgccgacgggaaggcgtggaaaagagaaacatgcaaacaccagacatccaactggtccatcacagtgctattcagaaatctaccaaggagcttcgagacatgtccaagaatagagagatagcatggcccctgtcaacgcttcctgtgttccaccctgtgactggggaaatcatacctcctttacacacagacaactatgatagcacaaacatgccattgatgcaaacgcagcagaacttgccacatcagactcagattccccaacagcagactacaggtaaatggtatccctgaagaaagaaaactgactgaagcaatgaatttataatcagacaatatagcagttacatcacatttcttttctcttccaataatgcatgagcttttctggcatatgttatgcatgttggcagtattaagtgtataccaaataatacaacataactttcattttactaatgtatttttttgtacttaaagcatttttgacaatttgtaaaacattgatgactttatatttgttacaataaaagttgatctttaaaataaatattattaatgaaaaaaaag

SEQ ID NO: 45 - DNA, 5677 bp, Homo sapiens
cagaagtcaaatagttaaagcaaattctagatacatggtagagaccaggagaaaatatgaataactttcttctaaacaaggagctcagtggataaaccatacctctagattccttgcttccattttcccagaaacaagatgaggaagagaaagatcagtgtgtgtcaacaaacttgggccttattatgcaagaactttcttaaaaaatggagaatgaaaagagagtccttaatggaatggctgaattcattgctcctactactttgtttgtatatatatcctcatagtcatcaagtaaatgatttttcttcactgcttaccatggacctgggacgggtagatacatttaatgaatccagattttctgttgtatacacacctgtcaccaacacgacccaacagataatgaataaagtagcctctactcccttcctggcaggtaaagaggtcttgggactgccagatgaggaaagtattaaagaattcacagcaaattatcctgaagaaatagtaagagtcacctttactaatacatactcatatcatttgaagttcttgctaggacatggaatgccagcaaagaaggagcacaaggaccatacagctcattgttatgaaacaaatgaagatgtttactgtgaagtttcagtattttggaaggaaggttttgtggctcttcaagctgccattaatgctgctattatagaaatcacaacaaatcactcagtgatggaggagctgatgtcagttactggaaaaaatatgaagatgcattccttcattggtcaatcaggagttataactgatttgtaccttttttcctgcattatttcattttcctcattcatttactatgcatctgttaatgtcacaagagagaggaaaaggatgaaggccttgatgacaatgatgggtcttcgggattcagcgttctggctctcctggggtttgctctatgctggtttcatcttcattatggcccttttcttggcacttgttataagatctacccagtttatcattttgtctggcttcatggtagtcttcagcctctttctcctgtatggattatctttggtagctttggctttcttaatgagcatcttggtaaagaaatctttcctcaccggcctggtcgtgttcctcctcactgtcttttgggggtgtctggggttcacatcactgtacagacaccttcctgcatccttggagtggattttaagcttgcttagtccctttgccttcatgcttggaatggcccagcttttacacttggactatgatttgaattctaatgcatttcctcatccatcggacggctcaaatctcattgtagcaacaaatttcatgttggcatttgacacttgcctctatctggcattggcgatttactttgaaaaaattttgccaaatgaatatggacatcgacgtccacctttgtttttcctgaagtcctcattttggtctcaaacacaaaagactgatcacgtggcccttgaagatgaaatggatgccgatccttcatttcatgactcttttgaacaagcgcctccagaattccaagggaaagaagccatcagaatcagaaatgttacaaaagaatataaaggaaagcctgataaaatagaagccttgaaagatctggtatttgacatttacgaaggccaaatcactgcaatacttggtcacagtggagctggaaagtcaacactgctaaacattcttagtgggttgtctgttcccaccaaaggttcagtcaccatctataacaataagctttcagaaatggctgacctagaaaatctcagcaagctgaccggagtttgtccacaatccaatgtgcaatttgacttcctcactgtaagagaaaacctcagactctttgctaaaataaaagggattctgccacaagaagtggataaagagattttcctgttggatgaaccaactgctggattggatcccttttcaagacaccaagtatggaaccttctgaaagaacgcaaaacagaccgcgtgatcctcttcagtacccagttcatggatgaggccgacatcctggcggacaggaaagtatttctctcccaagggaagctaaagtgcgcgggctcttctttgtttctaaagaagaaatgggggattggatatcacttaagcttgcagttaaatgaaatatgtgttgaggaaaacataacatcacttgttaaacagcacatccctgatgccaaattatcagccaaaagcgaaggaaaacttatttatacattacccttagaaagaacaaataaatttccagaactttacaaggatcttgatagctatcctgacctaggaattgagaattatggtgtttccatgacaactttgaatgaagtattcctgaagctagaaggaaaatctacaattaatgaatcggacattgctattttgggagaagtacaagcggaaaaagctgacgacactgaaaggcttgttgagatggaacaagtcctctcttcacttaacaagatgagaaagacaataggtggtgtggctctctggcgacagcaaatctgcgcaattgcaagggttcgcttgttaaagttaaagcatgaaagaaaagctcttttagcactgctattaattctaatggctggattttgccctcttcttgtggagtataccatggtgaaaatatatcaaaacagttacacctgggaactttctcctcatttgtatttccttgctcctggacaacaaccacatgaccctctcactcaactactgatcatcaataaaacaggggcaagcattgatgactttatacagtctgtggagcaccagaacatagctttagaagtggatgcatttggaactagaaatggcacagatgacccatcttataatggagccatcacagtgtgttgtaatgaaaagaattacagcttttcgttagcatgcaatgccaaaagattgaattgcttcccagttcttatggacattgttagtaatgggctacttggaatggttaaaccatcagtacatatccgaactgaaagaagtacatttttggagaatggacaggacaatccaatcggattcctggcatatatcatgttctggctggttttaacatcgagttgcccaccttacattgccatgagcagcatcgatgattataagaacagagctcggtcccagctacggatttccggactctccccttctgcttactggtttgggcaggcgctggtggatgtttccctgtacttcttggtcttcgtttttatatatttaatgagctacatttcaaacttcgaagacatgctacttacaataattcatattattcaaatcccatgtgctgttggttattccttttccctcatcttcatgacatacgtgatttccttcatctttcgcaaggggagaaaaaatagtggcatttggtcattttgtttctatgttgtcactgtattctctgtggctggatttgcgttcagtatcttcgaaagtgatattccatttatcttcacttttttaataccacctgccacaatgattggctgtttgttcttatcttctcatcttctcttttcttctctcttttctgaagaacgaatggatgtacagccatttctggtattcctaattcctttccttcattttatcatttttctttttactcttcgatgtctggaatggaagtttggaaagaaatcaatgagaaaggatcctttctttagaatttctccaagaagtagtgatgtgtgtcaaaatccagaagaaccagaaggagaggatgaagatgttcagatggaaagagtgagaacagcaaatgccttgaattctactaattttgatgagaagccagtcatcattgccagctgtctacgcaaggagtatgcagggaagaggaaaggctgtttttccaagaggaagaataagatagccacgagaaatgtctccttctgtgttagaaaaggtgaagttttaggattattaggacacaatggagctggtaaaagcacatccattaaggtgataactggagacacaaaaccaactgctggacaagtgctactgaaagggagcggtggaggggatgccctggagttcctggggtactgccctcaggagaacgcgctgtggcccaacctgacagtgaggcagcacctggaggtgtacgccgccgtgaaagggctgaggaaaggggatgctgaggttgccatcacacggttagtggatgcgctcaagctgcaggaccagctgaagtctccggtgaagaccttgtcagagggaataaagagaaagctgtgctttgtcctgagcatactggggaacccgtcagtggtgcttctggatgagccgtcgaccgggatggaccccgaggggcagcagcaaatgtggcaggccatccgggccacctttagaaacacggaaaggggtgccctcctaaccacccactacatggcagaggctgaggccgtgtgtgaccgagtggccatcatggtatctgggaggttgagatgtatcggttccatccaacacctgaaaagcaaatttggcaaagattacctgctggagatgaaggtgaagaacctggcacaagtggagcccctccatgcagagatcctgaggcttttcccccaggctgctcggcaggaaaggtactcctctctgatggtttataagttgccagtggaagatgtgcaacctttagcccaagctttcttcaaattagagaaggttaaacagagctttgacctagaggagtacagcctctcacagtctaccctggagcaggttttcctggagctctccaaggagcaggagctgggtgattttgaggaggattttgatccctcagtgaagtggaagctcctcccccaggaagagccttaaaaccccaaattctgtgttcctgtttaaacccgtggttttttttaaatacatttatttttatagcagcaatgttctatttttagaaactatattataagtacagaaatggttctccgtgtggtgggaggaggaggttcgggtgctgggtaagtgccatgtcagtgtggacagaggcatttgactaagccaacctcctctcacagcctctgtatctctgcaggccatactggttccattgttctgtataatactgaataaataaatttacttttacatgatcgtataagtttctagataagataaacaaattctgtttaaatttttttaataaaaatcttaaaacactttttttctaacctagactgagaaattcatgtttacttttctaggtgtatgatactttgtaaagttgatactttcctaagaatttaacatgtcatatttttgaaatagatttaagtgtgcttcttattgctaaaaatactaaatgtcatgggtcatagtatctgatatcaatatcgttgataacatatccacaggtaacaccatgatgtaggcataaatggaaaacaaaaaccctactatttcaaatatattgtacttttttatttctgtaagccaactgtgtgccattttcactggacttttaaatctagactttagtgatgtctacattgtaaatgatcttttgtggatatttgtcacttggtttcagaaagttcacaaatgtagcaacagctcacatgactgagtaggtagaaaatgtgaaataaatctcatatatatagttttg

SEQ ID NO: 46 - DNA, 840 bp, Homo sapiens
ggcgtctgccaggagctacggccggaagatggcggcggccgcagagttgtcgctactggagaagtccctgggactgagtaaggggaataaatacagtgctcagggcgagcgacagattccagttcttcagacaaacaatggtccaagtctaacaggattgactactatagcagctcatctagtcaagcaagccaacaaagaatatttgctggggagtactgcagaagaaaaagcaatcgttcagcagtggttagaatacagggtcactcaagtagatgggcactccagtaaaaatgacatccacacactgttgaaggatcttaattcatatcttgaagataaagtctaccttacagggtataactttacattagcagatatactattgtactatggacttcatcgctttatagttgacctgacagttcaagaaaaggagaaatatcttaatgtgtctcgctggttttgtcacattcagcattatccaggcatcaggcaacatctgtctagtgttgtcttcatcaagaacagactatatactaattcccactagaagctgtccatgccatacagaagatctattaaaaatgttttaaatggaaaatgtactctagaccacaggactaatgtaaattaatatacagtcattcattatttgttgaagttgatagaatttttgaagtgtaaacttgtgtctgaatgttttatttgttctttagctgaagttttgcaatttttatgtcaaaattcaattgctattaaacaagttgagatccagttataaattaaccttgtttttagtagatgacatttatttcaataaaagttgcaaatcgggaa

SEQ ID NO: 47 - DNA, 1855 bp, Homo sapiens
tgctttgctgtctcagtcaggtttctgtttttctgtcctccttgcctttcttcccgttttgcttcctgttttccttcttccttcccgttttccttcttccttccctgcctcccttcctttgactgtggatggaagaaagtgtgcagtttttagggattttacttaggttcgtctttagttttcctcagtaagatagttgttttttgatacctgagtttgggattaattcatatcaaattcaggtatttgtatattactcttgatttttgtctgaaattcactttgctatgacagcctagtagttgggtcttcactccttaagtatatgtttttcccatggtgaaaatacatgaactttagttctagtagtgagcattcaaaggtccgtgatagggcttgtcacagagagagagaaatcatttatccctattgtgctggttatcatagaagagactgcctcaccactttatagaaccaatttgcaaactaaaacactgtttggagaaggtacaaactacctttcaaaaaggctacaggaaacattttatgagcagcaaatattaggaagagagcggatacagaatttagtgcctttgagaagaatataattaagtggaattaagaggggttagaaaaaaggcaatttagaaaaatattcttgtaaaactttattgtttctatatgtgaaacagaagattagacaaattccttactcttaagtatttttttaagctgaaaaaaaattattttgagcaaataaccaataagagacatttgtctattttatattaatttaaatttgttagctctaggtttcaataagtcatgattggctagaatccattttagctaccatctgaagatatggtaaagataatttagtaaaacaaaagttcatatttgccatgatttcagatatgtttgtcatggggacaatattagagttttagagatactataaaatagcttgaatttctttctgcactacatacttttgatagaaacacatttactacattgataagatgttatgtcacacctgtgaaaatggagttggcattcagatatgctatagttagagcccagctcatctgcaagtatagtcttcccatgatgcatacaaagataacttactgatgtcgataggaggtccatacatatatccccaggaaaaatgacagattattctggaggaagatgaccttcattttatggttatgtgtgtgtgtctgtgtgtctttggaaaaatatatataattttttcaaataggaagccaacatatcaagtgatgaattaaagtatgctgcagaatatatattctaaaactacaaaaaagtcactgaatatcaaaatgatacagcttatacatatagttactgtgacaagtgacagactgctagttcagaattcaaaaatcctttcctagtttgtgagataatgggctaaattccttctgcctgccactggggcaaagcaaattgctttagtttttgatgagagttcttagaagtttgttggtattccttcatccacagcatccattgttgaaataaccattttcagttgtgatgccttaactaagaagccaattgttagcctgaaatgcaatcttggtagccagtttcaatgaagctagagattagtcagaaaaagttagctgttgggctttagaaagggattttgagtcctgtcatttctacttgggagcattttggagcagattagtctttcagtataaaaacaagtggctacctgatggaaacttttcttacccttatagggaaactgagcacaagctgaatgatattgtctgctgcaaaaaaaaacaaacaaaaaaaaaacaaaacaaaaaac

SEQ ID NO: 48 - DNA, 3658 bp, Homo sapiens
tgaggactcttagaagtgctcttatcagtagcatcttaattactttacaatggattttaaatggaaaggaagtttacaataatagcaaatgcatattgacagctctttagtgcccggtgctgttctaagtccttatgactaccctgtgaaataagttccaccatgaccccaattttcctgaaaaggagactgaggcatggagagctttagtattttgcccaatgtcacacagctagtaaatggggacccccatgtgaaactactcactgattgtcctactctcttgtggttttatctttttagcagacaccaaatgaggaatgtttgttcctggaaaggctggaggagaaccattacaacacctatatatccaagaagcatgcagagaagaattggtttgttggcctcaagaagaatgggagctgcaaacgcggtcctcggactcactatggccagaaagcaatcttgtttctccccctgccagtctcttctgattaaagagatctgttctgggtgttgaccactccagagaagtttcgaggggtcctcacctggttgacccaaaaatgttcccttgaccattggctgcgctaacccccagcccacagagcctgaatttgtaagcaacttgcttctaaatgcccagttcacttctttgcagagccttttacccctgcacagtttagaacagagggaccaaattgcttctaggagtcaactggctggccagtctgggtctgggtttggatctccaattgcctcttgcaggctgagtccctcaatgcaaaagtggggctaaatgaagtgtgttaaggggtcagctaagtgggacattagtaactgcacactatttccctctactgagtaaaccctatctgtgattcccccaaacatctggcatggctcccttttgtccttcctgtgccctgcaaatattagcaaagaagcttcatgccaggttaggaaggcagcattccatgaccagaaacagggacaaagaaatccccccttcagaacagaggcatttaaaatggaaaagagagattggattttggtgggtaacttagaaggatggcatctccatgtagaataaatgaagaaagggaggcccagccgcaggaaggcagaataaatccttgggagtcattaccacgccttgaccttcccaaggttactcagcagcagagagccctgggtgacttcaggtggagagcactagaagtggtttcctgataacaagcaaggatatcagagctgggaaattcatgtgcatctggggactgagtgtgggagtgcagagaaagaaagggaaactggctgaggggataccataaaaagaggatgatttcagaaggagaaggaaaaagaaagtaatgccacacattgtgcttggcccctggtaagcagaggctttggggtcctagcccagtgcttctccaacactgaagtgcttgcagatcatctggggacctggtttgaatggagattctgattcagtgggttgggggcagagtttctgcagttccatcaggtcccccccaggtgcaggtgctgacaatactgctgccttacccgccatacattaaggagcagggtcctggtcctaaagagttattcaaatgaaggtggttcgacgccccgaacctcacctgacctcaactaacccttaaaaatgcacacctcatgagtctacctgagcattcaggcagcactgacaatagttatgcctgtactaaggagcatgattttaagatgctttggcccaatgcctataaaatgcccatttcgaagatatacaaaaacatacttcaaaaatgttaaacccttaccaacagcttttcccaggagaccgtttgtattaccattacttgtataaatacacttcctgcttaaacttgacccaggtggctagcaaattagaaacaccattcatctctaacatatgatactgatgccatgtaaaggcctttaataagtcattgaaatttactgtgagactgtatcttttaattgcatttaaaaatatatagcttgaaagcagttaaactgattagtattcaggcactgagaatgatagtaataggatacaatgtataagctactcacttatctgatacttatttacctataaaatgagatttttgttttccactgtgctattacaaattttcttttgaaagtaggaactcttaagcaatggtaattgtgaataaaaattgatgagagtgttagctcctgtttcatatgaaattgaagtaattgttaactaaaaacaattccttagtaactgaactgtcatatttagaatggaaggaaaatgacagtttgtgaaagttcaaagcaatagtgcaattgaagaattgacctaagtaagctgacattatggttaataatagtattttagatttgtgcagcaaaataatttcataacttttttgtttttgttacttggataagatcaatctgttttattttagtaaatctttgcaggcaagttagagaaaatgcagtgtggcttaacgtctctttagtatgaagatttggccagaaaaagatacccagagaggaaatctaagataattataatggtccatactttttattgtatgaatcaaactcaagcataacattggccaaggaaaattaaataccattgctaacttgtgaaatggaagtctgtgatttcggagatgcaaagcattgtagtaaaaacaccaatgtgacctcgaccatctcagcccagatatcattcatatatctgttcaatgactattaaggtgcctactgtgtgctaggcactgtactggatactggggaccttgtctgtctggtttgctgctgtatcttctcccagggcattatatttatgatgaaagatgctgtggattcaattctttcagtcaagaataaacacagactttgtaggttcctgctgaataaagcaaatcccagaaacccagattttggaagaatcagcaacccccagcataaaataaacccctatcaaaatgtcagaggacatggcaaggtaaacttagcattttcaactttagaaccgggtcagcttcagggggactgctttcaaatcagccaaagagcctgtcagatcttcttagaaggaagaggttggtagttccctgctctgttttgaacatgctctagtttattaacctggggacattcccattgctgtcttaagtaagtctcatagccagctcctgtcacgtgactctcatatggattcattttcgggccagctctgaacaaagcatcatgaacatatgtgcttttggtcgtttgcaatgtgatggtggtggaggtaggtattggtttccttggaaggcatgataagaaagattcacaatggccaacagtgtgtatgaacaaaaaactgattggagcatcagctagtactgaaggtccttgctttgtgtcagaggcaaaggaacccaaggcgccaagtcctcagccttgagtgtactgctgacaactaaactcacaggctgcaaagcagacctctgatgaagatgcctgttatttcacatcactgtctttttgtgtatcatagtctgcaccttacaaatattaataaatgttccaataataggtgataatgtctctgagtttctgagcatcctgctgcctcatctttctatca

SEQ ID NO: 49 - DNA, 996 bp, Homo sapiens
gaattccggcccccctctaagatactgatggctctgcagaggacccattcattgcttctgcttttgctgctgaccctgctggggctggggctggtccagccctcctatggccaggatggcatgtaccagcgattcctgcggcaacacgtgcaccctgaggagacaggtggcagtgatcgctactgcaacttgatgatgcaaagacggaagatgactttgtatcactgcaagcgcttcaacaccttcatccatgaagatatctggaacattcgtagtatctgcagcaccaccaatatccaatgcaagaacggcaagatgaactgccatgagggtgtagtgaaggtcacagattgcagggacacaggaagttccagggcacccaactgcagatatcgggccatagcgagcactagacgtgttgtcattgcctgtgagggtaacccacaggtgcctgtgcactttgacggttagatgccaccatgtagggattatcgcgagtggttgaccttacacttactccttaaatagcagtgagtaatgcatttgagctgtcccaggctctgtctcctcagctcatttcctactctttttctctatataactcattctattaaatacattgcaccaaagagatatggagacataaacctgtaatgaatgaggctgggcttttctgtaataagcttccttttataatactggtcagcttagtctctcagatcctatcctgtggaatttagttattatgtgtatttatgtagtatttcaaacatttcaaaatgctttcatctatgtttatcacattttaataccacagacttataatgatgtcactacatatagaagctcaaagttaagggatttgctgaagactgtaaagttaatggaagaattgagacaaaaatccagtgtagctggccacttatccagggctttttctacttcatcacaaggaatgttttgaaagtgtctgctttttttatccttccggaattc

SEQ ID NO: 50 - DNA, 1085 bp, Homo sapiens
atcctgtctgtccgaacccagacacaagtcttcactccttcctgcgagccctgaggaagccttctttccccagacatggccaacaagggtccttcctatggcatgagccgcgaagtgcagtccaaaatcgagaagaagtatgacgaggagctggaggagcggctggtggagtggatcatagtgcagtgtggccctgatgtgggccgcccagaccgtgggcccttgggcttccaggtgtggctgaagaatggcgtgattctgagcaagctggtgaacagcctgtaccctgatggctccaagccggtgaaggtgcccgagaacccaccctccatggtcttcaagcagatggagcaggtggctcagttcctgaaggcggctgaggactctggggtcatcaagactgacatgttccagactgttgacctctttgaaggcaaagacatggcagcagtgcagaggaccctgatggctttgggcagcttggcagtgaccaagaatgatgggcactaccgtggagatcccaactggtttatgaagaaagcgcaggagcataagagggaattcacagagagccagctgcaggagggaaagcatgtcattggccttcagatgggcagcaacagaggggcctcccaggccggcatgacaggctacggacgacctcggcagatcatcagttagagcggagagggctagccctgagcccggcgctcccccagctccttggctgcagccatcccgcttagcctgcctcacccacacccgtgtggtaccttcagccctggccaagctttgaggctctgtcactgagcaatggtaactgcacctgggcagctcctccctgtgcccccagcctcagcccaacttcttacccgaaagcatcactgccttggcccctccctcccggcggcccccatcacctctactgtctcctccctgggctaagcaggggagaagcgggctgggggtagcctggatgtgggcgaagtccactgtcctccttggcggcaaaagcccattgaagaagaaccagcccagcctgccccctatcttgtacctggaatatttttggggttggaactctc

SEQ ID NO: 51 - DNA, 3336 bp, Homo sapiens
ccagggccggtgtctccaggagagggccgagcgcacagcagctctaggacctcgcaggcgcctcggcgcggcactcacgtagagcccaaggagcagtccccgacctctcctcggagggccgtgcaggcttccccggcggtccctacctgcgcctccgcccgccagcggcgctggggaaggggaggagcggcccggacgctgcccgccgcgcgcagggagccgcccgccgcaggccttgccgccgcccgcccgcgctctccccgcgagccccggagggcgggtctgcggccgagccagcggcggcggaggggcagcgcagacctctgcggcccgggcgggcgcggcgcgggagtcctgggccgctggcgggcaacgcctctgcccgacctcgctggggaaggctggcgctgctgcccggccggagccaggggcaggctgcgcaaaggtgacttagggagaccttgcgggccgccctgggtcgcgcctcccggatcggctcgcctcggctcgactggaggggaggaggaggagcaggccgagcgcattcgcgctggagcttgcgaggagcgcagggtggagcgcgccagccggggtcctcggatctggcccaggtgaggaattttaaattggaacaagagcaagaaaaaaacaaaatcttgtcagaagcactggagacgctggccactgaacatcatgaattagagcagtctctggtgaaaggctctccacccgccagcatccttagcgaggacgagttctatgatgcgctgtcagattccgagtccgaaaggtccctgagtagattggaagcagtgacagcacgctcctttgaagaggaaggagagcatttgggcagtagaaaacacagaatgtccgaagaaaaagactgtggtggcggagatgctctctccaatggcatcaagaaacacagaacaagtttgccttctcctatgttttccagaaatgacttcagtatctggagcatcctcagaaaatgtattggaatggaactatccaagatcacgatgccagttatatttaatgagcctctgagcttcctacagcgcctaactgaatacatggagcatacttacctcatccacaaggccagttcactctctgatcctgtggaaaggatgcagtgtgtagctgcgtttgctgtatctgctgttgcttctcagtgggaacggactggaaaacctttcaacccactgctgggagagacttatgaattagtgcgagatgaccttggatttagactcatctccgaacaggtcagccatcacccaccaatcagtgcatttcatgctgaaggattaaacaatgacttcatctttcatggctctatctatcccaaactgaaattctgggggaagagtgtagaagcagaacccaaaggaaccatcaccttggagctccttgaacacaatgaggcatatacatggacaaatcccacctgctgtgtgcataatatcattgtgggtaaactgtggatcgaacagtatggcaatgtggaaattataaaccacaagactggggacaaatgtgtgttgaattttaagccatgtggcctttttggtaaggaattacacaaagttgaaggctacattcaagataaaagcaaaaagaagctctgtgccctctatgggaagtggactgaatgtttatacagtgttgaccctgccacgtttgacgcttacaaaaaaaatgataagaaaaatacagaagagaagaagaacagcaaacagatgagcacctctgaggagttggatgaaatgccagtgccggattctgaaagtgtattcattatccctggaagcgttcttctatggcgaatagccccacggcctccaaattctgcccagatgtataattttactagttttgcaatggttttgaatgaagtagacaaagacatggagagtgtgattcccaagacagactgcaggttacggcctgacatcagagccatggaaaatggagagatagatcaagctagtgaagaaaaaaaacgacttgaggaaaaacaaagagcagcccgcaaaaacaggtccaagtcagaagaggactggaagacgaggtggttccatcaaggtcctaatccctacaatggagcacaggactggatttactctggcagctactgggacagaaattacttcaatttgcctgacatttattaaaatgcatacaagtcagggtgtttggctaatctacaaataagtcttaaacctatgtttttaaatttttttcccttggtttctacttatcttttaaaaaaaaaatgaaaaaacactcatgagataactgcatttcacccaacaaaagcagggtataaggcgatattggtgatgaaagtcttaggaaaaatgcataattttgctataaaatgtacttatttggaatactattttatatagaggtaagagaacactgctggggaatatgctttttatggttgctgttgccatatttactgaaggtttatacctaaatgtaactttagctttatggaactatatagtaatcccaaatcaagttattttgaatatttttatgctgtcatgcttgaatgttttagatgtaacctttgacatatttagaactctcctcctatacaatgtttattctcagatatagaggttatgtcattttataaagacttcattgataagatggcttttattcatactaatcctcccaatgttaccccttccatcttccaagaagaaaaaaaatgcctgaatattcagaatagatatttctgatttgaaaattctaaagaattaaactggaaaagtatttcatttacttagtgctctgaatttacttttacagttttctgcagtcagtatcattaaaatggttaagtttacatttgaactgaaaatatgtataaaatctagcaattcacaaaaatgccctagaaatatagattttaatcaccattacataatgacaaaccttgttaaatgcttccacttccagtggcaaatgccactagggaaagtaagttgcactcatgtaagtatcaaactatataaaaggaggccttgtgcatttcaagtttgcaaagtacctgtgtacttaaaatatgtgtggagacctactgtacagtagttttgcccctttaattggggcacattcatcttaaatcttatagtatttatccacccaaaccccagactgagatactgctcccaggggcctaggtagctgccagtccgtgattttaattgctgtcttgaagttaacaagtgttataatgaaataatctacctgatgctaaataaaggctttagaatgttccccaaaaaaaaaaaaaaaaaaaaaaaa

SEQ ID NO: 52 - DNA, 454 bp, Homo sapiens
tctgtcccgctgcgtgttttcctcttgatcgggaactcctgcttctccttgcctcgaaatggaccccaactgctcctgctcgcctgttggctcctgtgcctgtgccggctcctgcaaatgcaaagagtgcaaatgcacctcctgcaagaagagctgctgctcctgctgccctgtgggctgtgccaagtgtgcccagggctgcatctgcaaagggacgtcagacaagtgcagctgctgtgcctgatgccaggacagctgtgctctcagatgtaaatagagcaacctatataaacctggatttttttttttttttttttgtacaaccctgacccgtttgctacatctttttttctatgaaatatgtgaatggcaataaattcatctagactaaaaaaaaaaaaaaaaaaaaaaaaaaaaaaaaaaaaaaaaaaaaaaaaaaaaaaaaaaaaaaaaa

SEQ ID NO: 53 - DNA, 9078 bp, Homo sapiens
ctgaactagttgccagtgatcttgaaacgtgacagtaaccaagagataaataggtgacaatgacaggaaaattagatgtagtaaaagagagtgtttgagagcagaagctatggcaactaaagactggatttgaatccttcctagcttggtgacatgagcaaattacttgatttaagtgagcattttcccatctgtacagtggagataacgataattgtgcctgctaagaagaattgctgtgaagattagtgaaataatgcatgtaaaacatttggtacagtatgtgacacatagtacaaatagtttgctaggaagattgttattattcttcacttgtgatattgtgaagttttcatacagcaaattggacatcatgagatggattgattaaataaatagatttgaacttcaaggactggtagtgttcttgctttggaaagaagaaacttggtttatcctaataatagtaggataataatggtgaagtgataggtacaagtaatagtgtttatgatgcgctggtgatgataggaaaagaaagccattatatgggcaagagctagaagtaataaaatggtgcatttttcagtgatgtttggcctatgtagctattctctgataactataaaaatccttattattgaagattcttcaggaaaaaaaaacccttagtctgaaactttagcaccaatcccccttgccccccattgaaatacgtatttttaaaacatggcttttgataatgtgagggttttttcctttttgcgatttagcagtgctgattgtgtattgcagtagttgtgagagcattagaagcagcagtcgataggaggatggaaggtctggatgccgccttggggagttaggagattggcagacttaccctgtaccactctagccctactcctttgcccaagacagaaacacactgagatggataggagaatatgagcagttgataggaaagttctcagtggagtcaggatttaggttaggccaggagattgagaatataacagtttgtgtatgatgaaatggcatatttcacagaatgcagtaaaagcaggtagggtacaagtgcagcaacaggaagatgtcttttcttcattcagcaaacacttatttgagagcttaccatgtgctaggcacatacaaagataaataagatgcccttgatgatcctctatttaaaggagacatgtaaacaggttaacttagagtagagatggtgaatatgtgaacctgaggaaaggaagaaatagattaaattatctggagagagaggaaaagtcagcagaatggggacgagaatctttcggagctcagtgttctgataggagttatttccttgggcataggttccaagtatttttctaatataccatagaagccaggaaaactttcttctgttatctcaaatgatttaattactgacttgagtttgtgttgtctccttagacttgtgcaccatggacaattttgctgagggagatttcactgtggcggattatgccttgttagaagattgccctcacgtggatgattgtgtctttgctgctgaatttatgagcaatgattatgttcgtgtgactcagctttactgtgatggggtgggtgtgcaatataaagattatatccaaagtgagaggaatttggaatttgacatctgcagtatatggtgtagtaaaccaatttctgtcctgcaagattattgcgatgccattaaaataaacatcttctggccacttctgtttcaacatcaaaacagttccgtaatatcacgattgcatccctgtgtggacgccaacaattcacgtgcttctgagataaatttgaagaaactacaacatcttgagttgatggaagatattgtggatttggcaaagaaagttgctaatgattcattccttattggaggcttattgagaattggttgtaaaatagaaaataaaatcttggcaatggaagaagctctgaattggataaaatatgcaggcgatgtaacaattctaactaaattaggatcaattgacaattgttggcctatgttaagtattttctttactgaatacaagtaccacataactaaaattgtaatggaagactgcaatttgcttgaagaacttaaaactcaaagttgtatggattgtatagaggaaggagaactaatgaaaatgaaaggaaatgaagagttttccaaagaaagatttgatatagctattatctattacaccagagccattgaatatagacctgaaaactaccttctttatggtaaccgagctctttgttttcttcgtactggacagtttagaaatgcactcggtgatggaaagagagccactattctgaagaacacttggccaaagggtcattatcgttattgtgatgctctttctatgctgggggaatatgactgggccctgcaagcaaacataaaagctcaaaaactctgtaaaaatgaccctgagggaatcaaggatctaattcagcagcatgtaaagttacaaaaacaaatagaagacctacaaggtcgaacagcaaataaggatccaattaaagccttttatgaaaacagggcctacacacctaggagtttatcagcacctatatttactacttcacttaactttgtggagaaggaaagagatttcagaaaaattaatcacgaaatggccaacggtggtaatcagaatctaaaggtggcggatgaggcgttgaaggtagatgattgtgactgtcatcctgaattttcaccaccatcaagtcagcctccaaaacataaaggaaaacaaaaatctcgaaacaatgaatcagaaaagttcagttctagttcaccattgactttaccagcagatttgaagaacatcttggagaaacagttttctaaatcttccagagctgcacaccaggattttgctaatataatgaaaatgctgagaagcttaattcaagatggctatatggccttattggagcagcgttgccgcagcgctgcacaggcctttacagagttgctgaacggtttagatcctcaaaaaataaagcaattgaacctggccatgattaactatgttttggtcgtctatggacttgccatttctctccttggaataggacagcctgaggaattatctgaagccgaaaaccagtttaagaggattattgaacactaccccagtgagggccttgattgcttggcctactgtggaattggaaaagtgtatttgaaaaaaaacagatttctagaagctctcaatcactttgagaaagcaagaaccttgatttatcgtcttcctggagtgttaacttggcccacgagtaatgtgattattgaagagtctcagccacaaaaaataaagatgctgttagagaaatttgttgaagaatgcaagttccctccagtgccagatgccatttgttgctatcagaagtgccatggatattctaagatccagatatacataactgatccagactttaagggttttatacgcatcagctgttgccagtactgtaaaatagaatttcacatgaattgctggaagaagttaaaaactacaacctttaatgataaaattgacaaggattttctacaaggaatatgtcttacccctgactgtgaaggtgtcatttctaagattatcatcttcagcagtggtggtgaagttaaatgtgaatttgaacacaaggtcataaaagaaaaggttcctccaagacctattctgaaacagaaatgttctagcctagagaaactaagactgaaagaagacaaaaaattgaagagaaagatccaaaaaaaagaagcaaaaaagttagcacaagaaagaatggaggaggacttaagagaaagtaatccacccaaaaatgaagagcagaaagaaactgtagacaatgttcagcgttgtcagttccttgatgacagaattctacagtgtataaagcagtatgctgacaagattaaatccggcatacagaatacagccatgcttctcaaagaattgctttcttggaaagttttgagcacagaagactatacaacctgtttttctagcagaaattttctaaatgaagcagtggactatgttattcgccacttgattcaagaaaataacagagtaaagacaagaatatttctgcatgttttgagtgagcttaaagaagtggagcccaaattagccgcctggatccaaaaacttaatagctttggcttagatgccacaggaactttcttttctcgttatggagcatctcttaaactgcttgattttagtatcatgactttcctctggaatgagaaatatggtcacaaactagactctatagaaggaaagcaacttgattatttctctgagccagcatcattgaaggaagcccgttgtttaatatggctgctagaagaacacagagacaagttcccagcattgcatagtgctttagatgaattctttgatataatggacagccgctgtactgtgttaaggaaacaagatagtggtgaagcaccgtttagttcaaccaaggtgaaaaacaaaagcaagaaaaagaagccaaaggattcaaagcctatgttagttgggtctggaacaacttcagtaacttcaaataatgagatcatcacttcaagtgaagaccatagcaatcgaaattcagattctgcaggcccatttgcagtgcctgaccatcttcggcaagatgtagaagaattcgaagctctctatgaccaacacagtaacgaatatgttgtccgcaataagaagctatgggacatgaacccaaaacaaaaatgttcaactctatatgattacttctctcagtttttggaggaacatggtcccttggacatgagtaacaagatgttctctgcagaatatgagtttttcccagaagaaactcgacagatactagaaaaagcaggaggtttaaaaccttttctcttgggatgccctcgttttgttgtgattgacaactgtattgcactgaagaaggttgcatcacggctcaagaaaaaaaggaagaagaaaaacattaaaacaaaagtagaagaaatttcaaaagcaggggagtatgtacgagttaaactacaactgaatccagctgctagggaatttaaaccagatgtaaagtctaaaccagtgtcagattcatcttcagcaccagcttttgaaaatgtgaaacccaaacctgtgtctgcaaattctcccaagccagcttgtgaagatgtgaaggccaaaccagtatccgacaattcttctagacaagtttctgaggatgggcaacccaaaggggtctcttctaattctcctaaaccaggctctgaggatgcaaattacaagcgagtctcctgtaattcccccaaaccggttcttgaggatgtgaaaccaacttattgggctcaatcccatttggtcacaggatactgtacgtatcttcctttccagagatttgatatcacccagacaccgccagcatacataaacgtgttaccaggtttgccccagtacaccagcatatatacacccttggccagcctttctcctgaatatcagctaccaagatcagtaccagtggtgccgtcttttgtagccaatgacagagcagataaaaatgctgctgcctattttgagggtcatcatttgaatgctgagaatgttgctggtcaccagattgcctctgaaacacagatccttgagggctctttgggaatatctgtaaagtcacactgcagcacaggtgatgctcatacagtcctgagtgagtctaacagaaatgatgagcactgtggaaattctaacaacaaatgtgaagtaattccagaaagcaccagtgcagtaacaaacattccacacgtgcagatggttgccatacaggtatcttggaacataatacaccaagaagtcaatactgagccatataatccttttgaggaacgacaaggggaaatttcacggattgaaaaggagcaccaagtattacaagaccaacttcaagaagtgtatgaaaattatgagcagataaaacttaagggcttagaagagaccagggacctggaagagaagttgaaaaggcacttagaagaaaacaagatctcaaagacggaattagattggttccttcaagatttggaaagagaaattaaaaaatggcaacaggaaaaaaaagaaatccaagaaagactaaaatcactgaagaagaaaattaaaaaggtttcaaatgccagtgaaatgtatacccagaaaaatgatggaaaggaaaaggaacatgaattacatctggatcagtcccttgaaatcagcaacacacttacaaatgagaaaatgaaaatagaagagtatataaagaaagggaaagaggattatgaagagagtcatcagagagctgtggctgcagaggtatccgtacttgaaaactggaaggagagtgaagtgtataagctacagatcatggagtcacaagcagaagcctttctgaagaagctggggctgattagccgtgatcctgcagcatatcctgacatggagtctgatatacgttcatgggaattgtttctttctaatgttacaaaagaaattgagaaagcaaagtctcagtttgaagaacaaattaaggcaattaaaaatggttctcggctcagtgaactttctaaagtgcagatttctgagctttcatttcctgcctgtaacacggttcatcccgagttactccctgagtcttcaggccacgatggccaagggcttgtgacttctgcaagcgacgtgactggaaaccacgcagcacttcacagggatcctagtgtgttctctgctggtgattccccaggggaggctccttctgcgctgttgccagggccaccccctggtcagcctgaagccactcagctgacagggccaaaacgggctggccaggcagctctgtcagaacgaagccctgtggctgatcggaagcagcctgttcctccaggacgtgctgcgcgttcaagccagtctccaaaaaagccgttcaatagtattattgagcacctgtcagtggtattcccatgttacaacagcactgagcttgctggttttattaaaaaagtgcgaagcaaaaacaagaactcactctcaggattgagtattgatgaaattgtccaaagagtgacagaacacattctagatgaacagaaaaagaaaaagccaaacccaggaaaggacaagaggacttatgagcccagctctgccacccccgtgaccaggtcctcccagggctcaccctcggtggttgttgcaccatcacccaaaaccaaggggcagaaagcagaagatgtccctgtgaggattgcactgggtgcaagttcctgtgaaatatgccacgaggtgttcaaatcaaaaaacgtgcgtgtgctcaaatgtgggcacaagtatcacaaagggtgctttaagcagtggcttaaagggcagagcgcttgcccggcctgccagggtcgtgatctcctgacagaagagtcaccttctggaagaggctggcccagtcagaatcaggagctgccttcctgctcttctaggtagtcacacttcactaaagtgtcatccaccagtgtgttgaatccgaagaatgacaattttctaccactggtgtaaaaaacaaacatttgaagacccttgtgcattgtgtgtcacaaagctaaatacatggaaatcgttaatatcgctgatattaagtaatttccccactctgagtgaatactttgatgattgccaacagtggctaataaaatgacggctaccacactcatgggtcactggggctgcgcagggctctttgaggtgggtggcttcttttggaaagtactatgaacgtctcgaagcagtattctagtgataagaattcttaacatagccaagcgccccacgtttgttccccacgtttgttccccttttctgtttgaaaaacctgttctggtagctccacaagagagatgatactgactttttaaattttttacaagagtctgtattcctgatatgcctatatttttcctcaaagattctgcattttaaggatgggcataagcaaactatattttaataatttatagttaatgttaaaatattggctgatttagaccaaaagattcaaatctcctctttgtgaaatcccatctgcatttgattttttattattttatgttcccccgttagattgttttaagtgtttgcttttcatcttttatagatgtaatctgattttcaaaaatcattaacactttttaattagtatcgactaagactttttccccctggaatcgaggctgtgtgtccgtcatcccagcccccggttggagcctgctctttgaactccgctgccttccttagcagcttctgtcctcttctgtgagtcagtcagcgagtgcttgggatccgcatccagccgtgctgagcacacaacaggctgtgtgtggaaatggccaccaccattctccttccccaccccaccacaaaaagagaagctgtgtctttagacaaccctgaggtatctgtgttacaatcgttctgtgtttgatatttgtgtaaagtatgcatgcagtcttgtactgtgacctaagaacaaaactgtaactgcattagaaaccatgaaaaaattagatattgttttgtgacttttagacagtggtaaatatagaaccatgaattctggtcacattccatttctctccaacatgaaggatcaaaaaatgtttttcaatgtgttctttgttccactggaaacttagagtcatgagtttatgagctgatttggtcaccttcctctgcctttgttcactgtgagttctgatgtcttagtgacttagttcttagaagctcacgccttagtttgaaacagattctccacggtggtccccaaaacactgtctgcatatccataagaattgagcgctatgggtgttaacgtgcatgaggatcagtttgcagcagcaagtacaaaaggagaagaggaacatccgttgaatgagtgtgttttgtacataacttcagatacttgtgaacatgccttatatttgtccaacaactgtcagaataaagaacattctaaaatgag

SEQ ID NO: 54 - DNA, 9078 bp, Homo sapiens; identical to SEQ ID NO: 53

SEQ ID NO: 55 - DNA, 2857 bp, Homo sapiens
gaaagaagctgtctccatcttgtctgtatccgctgctcttgtgacgttgtggagatggggagcgtcctggggctgtgctccatggcgagctggataccatgtttgtgtggaagtgccccgtgtttgctatgccgatgctgtcctagtggaaacaactccactgtaactagattgatctatgcacttttcttgcttgttggagtatgtgtagcttgtgtaatgttgataccaggaatggaagaacaactgaataagattcctggattttgtgagaatgagaaaggtgttgtcccttgtaacattttggttggctataaagctgtatatcgtttgtgctttggtttggctatgttctatcttcttctctctttactaatgatcaaagtgaagagtagcagtgatcctagagctgcagtgcacaatggattttggttctttaaatttgctgcagcaattgcaattattattggggcattcttcattccagaaggaacttttacaactgtgtggttttatgtaggcatggcaggtgccttttgtttcatcctcatacaactagtcttacttattgattttgcacattcatggaatgaatcgtgggttgaaaaaatggaagaagggaactcgagatgttggtatgcagccttgttatcagctacagctctgaattatctgctgtctttagttgctatcgtcctgttctttgtctactacactcatccagccagttgttcagaaaacaaggcgttcatcagtgtcaacatgctcctctgcgttggtgcttctgtaatgtctatactgccaaaaatccaagaatcacaaccaagatctggtttgttacagtcttcagtaattacagtctacacaatgtatttgacatggtcagctatgaccaatgaaccagaaacaaattgcaacccaagtctactaagcataattggctacaatacaacaagcactgtcccaaaggaagggcagtcagtccagtggtggcatgctcaaggaattataggactaattctctttttgttgtgtgtattttattccagcatccgtacttcaaacaatagtcaggttaataaactgactctaacaagtgatgaatctacattaatagaagatggtggagctagaagtgatggatcactggaggatggggacgatgttcaccgagctgtagataatgaaagggatggtgtcacttacagttattccttctttcacttcatgcttttcctggcttcactttatatcatgatgacccttaccaactggtacaggtatgaaccctctcgtgagatgaaaagtcagtggacagctgtctgggtgaaaatctcttccagttggattggcatcgtgctgtatgtttggacactcgtggcaccacttgttcttacaaatcgtgattttgactgagtgagacttctagcatgaaagtcccactttgattattgcttatttgaaaacagtattcccaacttttgtaaagttgtgtatgtttttgcttcccatgtaacttctccagtgttctggcatgaattagattttactgcttgtcattttgttattttcttaccaagtgcattgatatgtgaagtagaatgaattgcagaggaaagttttatgaatatggtgatgagttagtaaaagtggccattattgggcttattctctgctctatagttgtgaaatgaagagtaaaaacaaatttgtttgactattttaaaattatattagaccttaagctgttttagcaagcattaaagcaaatgtatggctgccttttgaaatatttgatgtgttgcctggcaggatactgcaaagaacatggtttattttaaaatttataaacaagtcacttaaatgccagttgtctgaaaaatcttataaggttttacccttgatacggaatttacacaggtagggagtgtttagtggacaatagtgtaggttatggatggaggtgtcggtactaaattgaataacgagtaaataatcttacttgggtagagatggcctttgcaacaaagtgaactgttttggttgttttaaactcatgaagtatgggttcagtggaaatgtttggaactctgaaggatttagacaaggttttgaaaaggataatcatgggttagaaggaagtgtttgaaagtcactttgaaagttagttttgggccagcacggtagctcacccttgtaatcccagcactttgggaggctgaggtgggtagattacttgagcccaggaattcaagaccagcctgggcaacatggtgaaaccctgtttctataaaaaataatctgggctttgtagcatatgcctgtggtcccagctactgaggaggctgaggtgggaggattgcttgagcccaggaggcagaggttgcagtgagccaaggtcacgtcactgcactctagcctgggcaacagagtaagacaaaaaaatatatatatattgaaaatcaaaggaggcaaaattttgacagggaaggaagtaactgcaaaacactaggctttagtacggtacttatataaaatctagtccagttctctcatttaaaaaaatgaagacactgaagtacagacttaaatagctcagatagctaattaggaaatttcaagttggccaataatagcattctctctgacatttaaaaataatttctattcaaaatacatgcataattgattttacacctcattactggtggataatttatgtgatgtggattgctggtgtccagcatgacccataaacagggtcagaagaatgatggaatgttttagaataaactcctgcttatagtatactacacagttcaaaagatgtttaaaatgctttgatttactgctggta

SEQ ID NO: 56 - DNA, 4692 bp, Homo sapiens
gagaaggggaccttcaggtccaggcaaagggggaacttctgtcgtgggaacgaaaaagaaagaggatttacagggtggggggacagaggggcagcaggaaccagaagggagacagtggcggtcgcaccggggccgatccgagagttccccttagagaacggagctcacgggcggggaggcctcacctgctagtaggacgcagaaagacagaaggcgaaggagaccccctgccgtagccatcttgcctctctgctgagcggaagcccccgttcggctcctgtctgttagcggcctctctaggctaccactgacaccgtctctgtggcccggagcctaagagaccggaagttcgtgtttccaggcgcttccggaaaccgcgggagagggtcgctgacgtggaggcgtccgaagggcagcagggtgtgtcggggctcggattaagacatcggagtcggagacctgagagatgttaaccaaattcgagaccaagagcgcgcgggtcaaagggctcagctttcaccccaaaagaccttggatcctgactagtttacataatggggtcatccagttatgggactatcggatgtgcactctcattgacaagtttgatgaacatgatggtccagtgcgaggcattgacttccataagcagcagccactgttcgtctctggaggagatgactataagattaaggtttggaattacaagcttcggcgctgtcttttcacattgcttgggcacttagattatattcgcaccacgttttttcatcatgaatatccctggattctgagtgcctccgatgatcagaccatccgagtgtggaattggcaatctagaacctgtgtttgtgtgttaacagggcacaaccattatgtgatgtgtgctcagttccaccccacagaagacttggtagtatcagccagcctggaccagactgtgcgcgtttgggatatttctggtctgaggaaaaaaaacctgtcccctggtgcggtggaatcggatgtgagaggaataactggggttgatctatttggaactacagatgcagtggtgaagcatgtactagagggtcacgatcgtggagtaaactgggctgccttccaccccactatgccccttattgtatctggggcagatgatcgtcaagtgaagatctggcgcatgaatgaatcaaaggcatgggaggttgatacctgccggggccattacaacaatgtatcttgtgccgtcttccaccctcgccaagagttgatcctcagcaattctgaggacaagagtattcgagtctgggatatgtctaagcggactggggttcagactttccgcagagaccatgatcgtttctgggtcctagctgctcaccctaaccttaacctctttgcagcaggccatgatggtggtatgattgtgtttaagctggaacgggaacggccagcctatgctgttcatggcaatatgctacactatgtcaaggaccgattcttacgacagctggatttcaacagctccaaagatgtagctgtgatgcagttgcggagtggttccaagtttccagtattcaatatgtcatacaatccagcagaaaatgcagtcctgctttgtacaagagctagcaatctagagaatagtacctatgacctgtacaccatccctaaagatgctgactcccagaatcctgatgcgcctgaagggaaacgatcctcaggcctgacagccgtttgggtcgctcgaaatcggtttgctgtcctagatcggatgcattcgcttctgatcaagaatctgaagaatgagatcaccaaaaaggtacaggtgcccaactgtgatgagatcttctatgctggcacaggcaatctcctgcttcgagatgcggactctatcacactctttgacgtacagcagaagcggactctggcatctgtgaagatttctaaagtgaaatacgttatctggtcagcagacatgtcacatgtagcactactagccaaacacgccattgtgatctgtaaccgcaaactggatgctttatgtaacattcatgagaacattcgtgtcaagagtggggcctgggatgagagtggggtatttatctataccacaagcaaccacatcaaatatgctgtcaccactggggaccacgggatcattcgaactctggatttacccatctatgtcacacgggtgaagggcaacaatgtatactgcctagacagggagtgtcgtccccgggtactcaccattgatcccactgagttcaaattcaagctggccctgatcaacagaaaatatgatgaggtactgcacatggtgaggaatgccaaactagttggccagtctattattgcttatctccagaagaagggctatcctgaagtggcactgcattttgtcaaggatgagaaaactcgctttagtctggcactggagtgtggaaacattgagattgctctggaagcagccaaagcactggatgacaagaactgctgggaaaagctgggagaagtggccctgctgcaggggaaccaccagattgtggaaatgtgctatcagcgtaccaaaaactttgacaaagtttccttcctgtatcttatcactggcaacttagaaaaacttcgcaagatgatgaagattgctgagatcagaaaggacatgagtggccactatcagaatgccctatacctgggtgatgtgtcagagcgtgtgcggatcctgaagaactgtggacagaagtccctggcctatctcacagctgctacccatggcttagatgaagaagctgagagcctaaaggagacatttgacccagagaaggagacaatcccagacattgaccctaatgccaagctgctccagccacctgcacctatcatgccattggataccaattggcctttattgactgtatccaaaggattttttgaaggcaccattgccagcaaagggaagggaggagcactggctgctgacattgacattgacactgttggtacagagggctggggagaggatgcagagctgcagttggatgaagatgggtttgtggaggctacagaaggtttgggggatgatgctcttggcaagggacaggaagaaggaggtggctgggatgtagaagaagatctggagctccctcctgagctggatatatcccctggggcagctggtggggctgaagatggtttctttgtgcccccaaccaagggaacaagtccaactcagatctggtgtaataactctcagcttccagttgatcacatcctggcaggctctttcgaaacagccatgcggctccttcatgaccaagtaggggtaatccagtttggcccctacaagcaactgttcctacagacatacgcccgaggccgcacaacctatcaggctctgccctgcctaccctccatgtatggctatcctaatcgcaactggaaggatgcagggctgaagaatggtgtaccagctgtgggcctgaagcttaatgacctcatccaacggttgcagctgtgctaccagctcaccacagttggcaaatttgaggaggctgtggaaaaattccgttccatccttctcagtgtgccacttcttgttgtggacaataaacaagagattgcagaggcccagcagctcatcaccatttgccgtgagtacattgtgggtttgtccgtggagacagaaaggaagaagctgcccaaagagactctagaacagcagaagcgcatctgtgagatggcagcctatttcacccactcaaacctgcagcctgtgcacatgatcctggtgctgcgtacagccctcaatctgttcttcaagctcaagaacttcaagacagctgccacctttgctcggcgcctactagaactcgggcccaagcctgaggtggcccaacagacccgaaaaatcctgtctgcctgtgagaagaatcccacagatgcctaccagctcaattatgacatgcacaacccctttgacatttgtgctgcatcatatcggcccatctaccgtggaaagccagtagaaaagtgtccactcagtggggcctgctattcccctgagttcaaaggtcaaatctgcagggtcaccacagtgacagagattggcaaagatgtgattggtttaaggatcagtcctctgcagtttcgctaaggccccctttgtgtgcatgggtcagtcaccatatgttccccccagagaatgtgtctatatcctccttctaacagcaccttccccctgcagctactcttcagatctggctctctgtaccctaaaacctagtatctttttctcttctatggaaaatccgaaggtctaaacttgacttttttgaggtcttctcaacttgactacagttgtgctcataattgtccttgcctttccagcttaattattttaaggaacaaatgaaaactctgggctgggtggagtggctcatacctgtaatcccagcactttgggaggctacggtgggcagatcatctgaggccaggagttcgagacctgcctggccaacatggcaacaccccgtctctaataaaaatataaaaattagcctggcatggtagcatgcgcctatagtcccagctgctcaggaggctgaggcatgagaatcgcttgaacctaggaggtggaggttgcattcaactgagatcataccacttcattccagcctgggtgacagagcaagactctgtctcaaa

SEQ ID NO: 57 - DNA, 1462 bp, Homo sapiens
gcccgcgccgcgccgctctttctccgacagctgccgggggtgccctgcaagctgttccgcgcgtcctgcccgtctgtccccgcgggtcgtcgcccgccacagccgcgccatgaccacccagcagatagacctccagggcccggggccgtggggcttccgcctcgtgggcggcaaggacttcgagcagcctctcgccatttcccgggtcactcctggaagcaaggcggctctagctaatttatgtattggagatgtaatcacagccattgatggggaaaatactagcaatatgacacacttggaagctcagaacagaatcaaaggctgcacagacaacttgactctcactgtagccagatctgaacataaagtctggtctcctctggtgacggaggaagggaagcgtcatccatacaagatgaatttagcctctgaaccccaggaggtcctgcacataggaagcgcccacaaccgaagtgccatgccctttaccgcctcgcctgcctccagcactactgccagggtcatcacaaaccagtacaacaacccagctggcctctactcttctgaaaatatctccaacttcaacaatgccctggagtcaaagactgctgccagcggggtggaggcgaacagcagacccttagaccatgctcagcctccaagcagccttgtcatcgacaaagaatctgaagtttacaagatgcttcaggagaaacaggagttgaatgagcccccgaaacagtccacgtctttcttggttttgcaggaaatcctggagtctgaagaaaaaggggatcccaacaagccctcaggattcagaagtgttaaagctcctgtcactaaagtggctgcgtcgattggaaatgctcagaagttgcctatgtgtgacaaatgtggcactgggattgttggtgtgtttgtgaagctgcgggaccgtcaccgccaccctgagtgttatgtgtgcactgactgtggcaccaacctgaaacagaagggccatttctttgtggaggatcaaatctactgtgagaagcatgcccgggagcgagtcacaccacctgagggttatgaagtggtcactgtgttccccaagtgagccagcagatctgaccactgttctccagcaggcctctgctgcagctttttctctcagtgttctggccctctcctctcttgaaagttctctgcttactttggttttccctctgcttgtaaaacattgagtcccctccctgccttggttaattgactcacaccagctgtgcgatgcccgcttttacaattaaaggaaaactgttttgttcagtgtcaccttgtcagcaacactgtgtcccttcgccccaccgttcttctctgctgcatttggacatcagccaaatttgaacccaatcaaatataacgtgtctgacactgattttgtttttactcaataaatgtatagactacaaaaaaaaaaaaa

SEQ ID NO: 58 - DNA, 5759 bp, Homo sapiens
ataccctgtggtgctagtgtaaaatcaaatataatctacctctttagcttttctgttatgtaattggaatgaaaaaatagtgcttttttttttttttcatttttgagattgagttaccatggagggaaagaacatgtgttttaccagtggaacgcattctttgtgttatctcttcgatttttaacattttatgtttccagtttataaactttgcctccagtttgatgaagaaaatttagctattagaaagtatttaaaatctcaaaagtatgacattttaaaatgttagcaggtttaaagataacttagtttttcaactcttaacccaaaattatacttgtatactataatttgtgttgaattacttggtattatttatcatcctagtaagatctattttatataatttgattcactttttatattgaattatgttaattgtttttgtaatacacctttcatatttcttcaaagaaaactagtgttgggttattgctaattttgcttcgtggtttggttatttacatataaaaattatattgttttaaaaattgcaaagtgatcatttattgacacatcagcaagaattaatgttgaaatgcaagttttttcccctatccttaactaagtgtgtagatatctttgttttgtttctttaatagatagcaaacaataaagatgcattgaggaagacatggaaccctaagtttacattgagaagtcactttgatggcatccgagcccttgctttccatcccattgagcctgttttgataacagcatcagaggatcacacattaaaaatgtggaatttacagaaaacagccccagccaaaaagtgagaatattctactttaacattatttgaatattttaagtaacattttcagcagaaaactacatattttatgatttctgttaaatttcccaaacatttcttctagttctttcttccatgtcatgtaatttattgtgtttttccatttatacaacctaatgctaggttagaaaactgatgcttaggaagatatggtattatcttttggtttcaccagggtttgtgaatactgattacagtctttatacataacagtatttttaaatggctgctatatttggggagccccttgtctatactgaaggtttggactgttcttgtaaacaggtatatgcatctttaaaataatcaaatgtccacctccaccttgccccattgtttactagatttagacttatgagatggagcagagaaaagcctcactgggatgggtggagggtcttggtcttgtcttttggccttgagactttaggtactttccatacccaccaatatgtctagactcagaggctaacatgactgctagtgctcaccttggccctttagttcctgtctaagcatggatagacatgagttagtataaaccctttaaaagtcacaaagctaaatctggttctacttgcttgggtccttatcggagctccactcctttgggtcacatgtcaaaaaaaaaaaaaaaaaggcgccgtccgctgcgctgggggctcggtctatgacgagcagcggggtctgccatgggtcgggggctgctcaggggcctgtggccgctgcacatcgtcctgtggacgcgtatcgccagcacgatcccaccgcacgttcagaagtcggttaataacgacatgatagtcactgacaacaacggtgcagtcaagtttccacaactgtgtaaattttgtgatgtgagattttccacctgtgacaaccagaaatcctgcatgagcaactgcagcatcacctccatctgtgagaagccacaggaagtctgtgtggctgtatggagaaagaatgacgagaacataacactagagacagtttgccatgaccccaagctcccctaccatgactttattctggaagatgctgcttctccaaagtgcattatgaaggaaaaaaaaaagcctggtgagactttcttcatgtgttcctgtagctctgatgagtgcaatgacaacatcatcttctcagaagaatataacaccagcaatcctgacttgttgctagtcatatttcaagtgacaggcatcagcctcctgccaccactgggagttgccatatctgtcatcatcatcttctactgctaccgcgttaaccggcagcagaagctgagttcaacctgggaaaccggcaagacgcggaagctcatggagttcagcgagcactgtgccatcatcctggaagatgaccgctctgacatcagctccacgtgtgccaacaacatcaaccacaacacagagctgctgcccattgagctggacaccctggtggggaaaggtcgctttgctgaggtctataaggccaagctgaagcagaacacttcagagcagtttgagacagtggcagtcaagatctttccctatgaggagtatgcctcttggaagacagagaaggacatcttctcagacatcaatctgaagcatgagaacatactccagttcctgacggctgaggagcggaagacggagttggggaaacaatactggctgatcaccgccttccacgccaagggcaacctacaggagtacctgacgcggcatgtcatcagctgggaggacctgcgcaagctgggcagctccctcgcccgggggattgctcacctccacagtgatcacactccatgtgggaggcccaagatgcccatcgtgcacagggacctcaacagctccaatatcctcgtgaagaacgacctaacctgctgcctgtgtgactttgggctttccctgcgtctggaccctactctgtctgtggatgacctggctaacagtgggcaggtgggaactgcaagatacatggctccagaagtcctagaatccaggatgaatttggagaatgctgagtccttcaagcagaccgatgtctactccatggctctggtgctctgggaaatgacatctcgctgtaatgcagtgggagaagtaaaagattatgagcctccatttggttccaaggtgcgggagcacccctgtgtcgaaagcatgaaggacaacgtgttgagagatcgagggcgaccagaaattcccagcttctggctcaaccaccagggcatccagatggtgtgtgagacgttgactgagtgctgggaccacgacccagaggcccgtctcacagcccagtgtgtggcagaacgcttcagtgagctggagcatctggacaggctctcggggaggagctgctcggaggagaagattcctgaagacggctccctaaacactaccaaatagctcttctggggcaggctgggccatgtccaaagaggctgcccctctcaccaaagaacagaggcagcaggaagctgcccctgaactgatgcttcctggaaaaccaagggggtcactcccctccctgtaagctgtggggataagcagaaacaacagcagcagggagtgggtgacatagagcattctatgccttttacattgtcataggataagctgtgttagcacttcctcaggaaatgagattgattttacaatagccaataacatttgcactttattaatgcctgtatataaatatgaatagctatgttttatatatatatatatatatctatatatgtctatagctctatatatatagccataccttgaaaagagacaaggaaaaacatcaaatattcccaggaaattggttttattggagaactccagaaccaagcagagaaggaagggacccatgacagcattagcatttgacaatcacacatgcagtggttctctgactgtaaaacagtgaactttgcatgaggaaagaggctccatgtctcacagccagctatgaccacattgcacttgcttttgcaaaataatcattccctgcctagcacttctcttctggccatggaactaagtacagtggcactgtttgaggaccagtgttcccggggttcctgtgtgcccttatttctcctggacttttcatttaagctccaagccccaaatctggggggctagtttagaaactctccctcaacctagtttagaaactctaccccatctttaataccttgaatgttttgaaccccactttttaccttcatgggttgcagaaaaatcagaacagatgtccccatccatgcgattgccccaccatctactaatgaaaaattgttctttttttcatctttcccctgcacttatgttactattctctgctcccagccttcatccttttctaaaaaggagcaaattctcactctaggctttatcgtgtttactttttcattacacttgacttgattttctagttttctatacaaacaccaatgggttccatctttctgggctcctgattgctcaagcacagtttggcctgatgaagaggatttcaactacacaatactatcattgtcaggactatgacctcaggcactctaaacatatgttttgtttggtcagcacagcgtttcaaaaagtgaagccactttataaatatttggagattttgcaggaaaatctggatccccaggtaaggatagcagatggttttcagttatctccagtccacgttcacaaaatgtgaaggtgtggagacacttacaaagctgcctcacttctcactgtaaacattagctctttccactgcctacctggaccccagtctaggaattaaatctgcacctaaccaaggtcccttgtaagaaatgtccattcaagcagtcattctctgggtatataatatgattttgactaccttatctggtgttaagatttgaagttggccttttattggactaaaggggaactcctttaagggtctcagttagcccaagtttcttttgcttatatgttaatagttttaccctctgcattggagagaggagtgctttactccaagaagctttcctcatggttaccgttctctccatcatgccagccttctcaacctttgcagaaattactagagaggatttgaatgtgggacacaaaggtcccatttgcagttagaaaatttgtgtccacaaggacaagaacaaagtatgagctttaaaactccataggaaacttgttaatcaacaaagaagtgttaatgctgcaagtaatctcttttttaaaactttttgaagctacttattttcagccaaataggaatattagagagggactggtagtgagaatatcagctctgtttggatggtggaaggtctcattttattgagatttttaagatacatgcaaaggtttggaaatagaacctctaggcaccctcctcagtgtgggtgggctgagagttaaagacagtgtggctgcagtagcatagaggcgcctagaaattccacttgcaccgtagggcatgctgataccatcccaatagctgttgcccattgacctctagtggtgagtttctagaatactggtccattcatgagatattcaagattcaagagtattctcacttctgggttatcagcataaactggaatgtagtgtcagaggatactgtggcttgttttgtttatgtttttttttcttattcaagaaaaaagaccaaggaataacattctgtagttcctaaaaatactgacttttttcactactatacataaagggaaagttttattcttttatggaacacttcagctgtactcatgtattaaaataggaatgtgaatgctatatactctttttatatcaaaagtctcaagcacttatttttattctatgcattgtttgtcttttacataaataaaatgtttattagattg

SEQ ID NO: 59 - DNA, 1701 bp, Homo sapiens
cggccggccgccatggctaacgtggctgacacgaagctgtacgacatcctgggcgttcccgcgggcgccagcgagaacgagctgaagaaggcatacagaaagttagccaaggaatatcatcctgataagaatccccaaatgcaggagacaaactttaaagaaataagttttgcatatgaagtactatcaaatcctgagaagcgtgagttatatgacagatacggagagcaaggtcttcgggaaggcagcggcggaggtgggtggcatggattgatattttctctcaccgttttttgtgggggattgttcggcttcatgggcaatcagagtagaagtcgaaatggcagaagaagaggagaggacatgatgcatccactcaaagtatctttagaagatctgtataatggcaagacaaccaaactacaacttagcaagaatgtgctctgtagtgcatgcagtggccaaggcggaaagtctggagctgtccaaaagtgtagtgcttgtcgaggtcgaggtgtgcgcatcatgatcagacagctggctccagggatggtacaacagatgcagtctgtgtgctctgattgtaatggtgaaggagaggtaattaatgaaaaagaccgctgtaaaaaatgtgaagggaagaaggtgattaaagaagtcaagattcttgaagtccacgtagacaaaggcatgaaacatggacagagaattacattcactggggaagcagaccaggccccagagtggaacccggagacattgttctttttgctaccaggagaaaagaacatggaggtatttcagagagatgggaatgatttgcacatgacatataaaataggacttgttgaagctctatgtggatttcagttcacattaagccaccttgatggacgtcagattgtggtgaaatacccccctggcaaagtaattgaaccagggtgtgttcgtgtagttcgaggtgaagggatgccgcagtatcgtaatccctttgaaaaaggtgggctttacataaagtttgatgtgcagtttcctgaaaacaactggatcaacccagacaagctttctgaactagaagatcttctgccatctagaccggaagttcctaacataattggagaaacagaggaggtagagcttcaggaatttgatagcactcgaggctcaggaggtggtcagaggcgtgaagcctataatgatagctctgatgaagaaagcagcagccatcatggacctggagtgcagtgtgcccatcagtaaactctgcaaacaaattgcacaggtggattttctttccacatttgcctgatttgttctcagcaatccagctggagtgtcttatcaatccagatgaactgagggacatctgttggtctatgtataacttttaaaattggtatagtatctacagagtgtataatttaaactaaccacaaagctttacatcttcattttgactgttccatagcagaataaagcacttgaaaggaaacaagactccctttcacacatggattattataagtttcaatcctggtatctgtgcttgatttttatcagttttgtgtagatttttatgtttcatattttaaatttaaatcccacattgtaaagtttgtacaatttgtcctgaagctttgtgtttggctgcacctgcataagctgctacaaatagaataaagaatttcatagcctgtaaaa

SEQ ID NO: 60 - DNA, 2306 bp, Homo sapiens
aaaagggggcgggaagggctgtagggtacttgtcaattcgccgccatgaacgtggtttttgctgtgaagcagtacatttccaaaatgatagaggacagcgggcctggtatgaaagtacttctcatggataaagagacgactggcatagtgagtatggtatacacacaatcggagattctacagaaggaagtgtacctctttgaacgcattgattctcaaaatcgagagatcatgaaacacctgaaggcaatttgttttcttcgacctacaaaggagaatgtggattatattattcaggagctccgaagacccaaatacactatatatttcatttatttcagtaatgtgatcagcaagagtgacgtgaagtcattggctgaagctgatgaacaggaagttgtggctgaggttcaggaattttatggtgattacattgctgtgaacccacatttgttttccctcaatattttgggttgctgccagggtcgaaattgggatccagcccagctatctagaacaactcaagggcttacagctctccttttatctctgaagaagtgtcccatgattcgttatcagctctcatcagaggcagcaaagagacttgcagagtgcgttaagcaagtaataactaaagaatatgaactgtttgaattccgtcggacagaggttcctccattgctccttattttagatcgctgtgatgatgccatcaccccattgctaaaccagtggacatatcaggccatggtccacgaactactaggcataaacaacaatcggattgatctttccagagtgccgggaatcagtaaagacttaagagaagtggtcctatctgctgaaaatgatgaattctatgctaataatatgtacctgaactttgctgagattggtagcaatataaagaatctcatggaagattttcagaagaagaaaccaaaagaacagcaaaaactagaatcaatagcagacatgaaggcgtttgttgagaattatccacagttcaagaaaatgtctgggactgtttcaaagcatgtgacagtggttggagaactgtctcgattggtcagtgaacggaatctgctggaggtttcagaggttgagcaagaactggcctgtcaaaatgaccattctagtgctctccagaatataaaaaggcttctgcagaaccccaaagtgacagagtttgatgctgcccgcctggtgatgctttatgctttacattatgagcgacacagcagcaatagcctgccaggactaatgatggacctcaggaataaaggtgtttctgagaagtatcgaaagctcgtgtctgcagttgttgaatatggtggtaaacgagtcagaggaagtgacctcttcagccccaaagatgctgtggctatcaccaaacaattcctcaaaggactgaagggagtagaaaatgtatatacacagcatcaacctttcctacatgaaaccctggatcatctcatcaaaggaaggcttaaggaaaacctatatccttatttaggccccagcacactcagagacagacctcaggatatcattgtgtttgtaattggaggagccacctatgaagaggctctaacagtttataacctgaaccgcaccactcctggagtgaggattgtcctgggaggcaccacagtgcacaacacgaaaagtttcctagaggaagttctggcttctggactgcacagccgaagcaaggagagctctcaagtcacatcaaggtcagcgagcagaagatgaaacggtggttgggggaagggcacagcttcctctcttgtccccactacaggttttccctactaaacaaaggtgttggagagcagctttgggttctgtgctggttgttagaactcatctccaggtagcccacggatacgtggtttggcacagacacaagactcccagagttgtcctaacaataagtctgagcccatctcaacccacttttctccggtagtctttatgtatctgttagcacaatcacttcagttactgatgaattttgttgggatctgacttggggaaagggttatcagagcctagaggggcttaaaaagtaatcatttgatgtacataccacactccttggcttcctttctcttcccttaaccctttctgcttttcattaaccacattcctgcacaactcatttctgaaaacctaccatgtttctttacagagccatccaaaaattttttgtccctacatagcaattttctgtggcactgagaaaccatgtatgaccacaataaaaatccattttgtgaaaaaaaaaaaaaaaaaaaaaa

SEQ ID NO: 61 - DNA, 2240 bp, Homo sapiens
cggaggttgaggggcgtccgaggcgcggaggggctggctgggcaggaggggttggcggggcagcagggccgcggccatggggagcttgaaggaggagctgctcaaagccatctggcacgccttcaccgcactcgaccaggaccacagcggcaaggtctccaagtcccagctcaaggtcctttcccataacctgtgcacggtgctgaaggttcctcatgacccagttgcccttgaagagcacttcagggatgatgatgagggtccagtgtccaaccagggctacatgccttatttaaacaggttcattttggaaaaggtccaagacaactttgacaagattgaattcaataggatgtgttggaccctctgtgtcaaaaaaaacctcacaaagaatcccctgctcattacagaagaagatgcatttaaaatatgggttattttcaactttttatctgaggacaagtatccattaattattgtgtcagaagagattgaatacctgcttaagaagcttacagaagctatgggaggaggttggcagcaagaacaatttgaacattataaaatcaactttgatgacagtaaaaatggcctttctgcatgggaacttattgagcttattggaaatggacagtttagcaaaggcatggaccggcagactgtgtctatggcaattaatgaagtctttaatgaacttatattagatgtgttaaagcagggttacatgatgaaaaagggccacagacggaaaaactggactgaaagatggtttgtactaaaacccaacataatttcttactatgtgagtgaggatctgaaggataagaaaggagacattctcttggatgaaaattgctgtgtagagtccttgcctgacaaagatggaaagaaatgcctttttctcgtaaaatgttttgataagacttttgaaatcagtgcttcagataagaagaagaaacaggagtggattcaagccattcattctactattcatctgttgaagctgggcagccctccaccacacaaagaagcccgccagcgtcggaaagaactccggaagaagcagctggctgaacaagaggaactggagcgacaaatgaaggaactccaggccgccaacgaaagcaagcagcaggagctggaggccgtgcggaagaaactggaggaagcagcatctcgtgcagcagaagaggaaaagaaacgccttcagactcaagtggaacttcaggccaggttcagcacagagctggaaagagagaagcttatcagacagcagatggaagaacaggttgctcaaaagtcctctgaactggaacagtatttacagcgagtacgggagctggaagacatgtacctaaagctgcaggaggctcttgaagatgagagacaggcccggcaagatgaagagacagtgcggaagcttcaggccaggttgttggaggaagagtcttccaagagggctgaactagaaaagtggcacttggagcagcagcaggccattcagacaaccgaggcggagaagcaggagttggagaatcagcgtgtcctgaaggaacaggccctgcaggaggccatggagcagctggagcagcttgagttagaacggaagcaagcacttgagcagtacgaggaagttaaaaagaagctggagatggcaactaataagaccaagagctggaaggacaaagtggcccatcatgaaggattaattcgactgatagaaccaggttcaaagaaccctcacctgatcactaactggggacctgcagctttcactgaggcagaacttgaagagagagagaagaactggaaagagaaaaagaccacggagtgactgagctttctggcagtcacgtcagttatgtagatactgcatggcaggagagctttacgctaaagacaaaagaaacagctttgggggccgggcgtggtggctcacgcctgtaatcccagcactttgggaggccgaggcgggtggatcacctgaggtcaggagttcaagagcagcctggccgacctggtgaaaccctgtctctactaaaaatacaaaaaaaattggctgagcgtggtggcgggcgcctgtgatcccagctacttgggaggctgaggcaggagaatcacttgaacgtgggaggcggaggttgcagcgagctgagatcatgccgttgtactccagcttgggcaacagagtgagactccatctcaaaacaaaacaaaaaaaaaaaaaaaaaaaaaaaaaa

SEQ ID NO: 62 - DNA, 2088 bp, Homo sapiens
gtttgagcagcattgttagagcctgtggaaaacactttacaactgtgtaactgtcttcatctttacagaggaatagtctacaaaggaagacttgtaacctggagaagagacctgtcatttactccatcctttatagtgatgctacaggacgaagaggaatggataaaaacattggcgagcaactcaataaagcgtatgaagccttccggcaggcatgcatggatagagattctgcagtaaaagaattacagcaaaagactgagaactatgagcagagaatacgtgaacaacaggaacagctgtcactccaacagactattattgacaagctaaaatctcagttacttcttgtgaattccactcaagataacaattatggctgtgtccctctgcttgaagacagtgacacaagaaagaatactttgactcttgctcagccacaagataaagtgatttcaggaatagcaagagaaaaactaccaaaggtaagaagacaagaggtttcttctcctagaaaagaaacttcagcaaggagtcttggcagtcctttgctccatgaaaggggtaatatagagaagacttcctgggatctgaaagaagaatttcataaaatatgcatgctagcaaaagcacagaaagaccacttaagcaaacttaatataccagacactgcaactgaaacacagtgctctgtgcctatacagtgtacggataaaacagataaacaagaagcgctgtttacgcctcaggctaaagatgatataaatagaggtgcaccatccatcacatctgtcacaccaagaggactgtgcagagatgaggaagacacctctttggaatcactttctaaattcaatgtcaagtttccacctatggacaatgactcaactttcttacatagcactccagagagacccggcatccttagtcctgccacgtctgaggcagtgtgccaagagaaatttaatatggagttcagagacaacccagggaactttgttaaaacagaagaaactttatttgaaattcagggaattgaccccatagcttcagctatacaaaaccttaaaacaactgacaaaacaaagccctcaaatctcgtaaacacttgtatcaggacaactctggatagagctgcgtgtttgccacctggagaccataatgcattatatgtaaatagcttcccacttctggacccatctgatgcaccttttccctcactcgattccccgggaaaagcaatccgaggaccacagcagcccatttggaagccctttcctaatcaagacagtgactcggtggtactaagtggcacagactcagaactgcatatacctcgagtatgtgaattctgtcaagcagttttcccaccatccattacatccaggggggatttccttcggcatcttaattcacacttcaatggagagacttaagacacatttgaaaacagacatatcaagttctatgtgatgattttgggtttttaatactataaatacttgattgtaaactaaattcaagatcatttataggaaaatctagtttcacagctatttgaatttttttctggatttactatataactcttattttttaaaagatcattctgttctttcaaggagaaataagcctaaaagaagaaaaacaaaaaaaattctgtataaaactgtaatcctttgtattcatgtttacagtgctattactataattcaaaattatgtatgtgacttagagttatataatcataatttatgtttatttcaaatatctaagtttattgcttggatttctagtgagagctgttgaatttggtgatgtcaaatgtttctagggttttttagtttgtttttattgagaaaattgattatttatgctataggtgatattctctttgaataaacctataataggaaatagcagaccacataaacatctttgtaaatatcaaacctaatacatttcttgtccagtgataaaacaactggtagaattatttaaacactttagatttttaaataataaacatggctttaatttttactgtgtgtatagctacatgatgaaattaattaaatattaagaggt

SEQ ID NO: 63 - DNA, 1247 bp, Homo sapiens
cggaggagcgggtcccgggatgtgaccggggctctgcttgtggctgcggcggtggcttctgaggctgtcgggtctttgcgggttgcggaagggggccccaatacccttcttcttcaggtcttaagaagctggccgtggtgcaataaggaacttaaaacaatggaagagcggaaagtgaagaggaggagtcctaagtcttttagtgcccactgtactcaggttgtcaatgccaaaaaaaaatgccattccagtgagtaaaagcacagggttttcaaatcctgcatcacagtcaacttcacagcgaccaaagttaaaaagagtgatgaaagaaaagaccaaacctcagggtggagagggcaaaggcgctcagtcaactccgatccagcactccttcctcactgatgtctcagatgttcaggagatggagagagggctgctcagtcttttgaatgatttccactctggaaaacttcaagcatttggaaatgaatgttccattgaacagatggaacatgttcggggaatgcaggagaaattagctcgcttgaatttggagctctatggggagttagaggaacttcctgaggataagagaaaaacagccagtgactccaatctggataggcttctgtcagatttagaagaattgaattcttccatacaaaaactccatttggcagatgcacaagatgttccaaatacttctgctagctaaaatgaaatgtagtttgctttcttgtgatttgaagagaagcagcagtctttacttttccagccaaatccagtagcagaatcatcttccacaacaaggaattaaagtaattaaagtgcaagttcaatgatcgttttcacttactgcttttagtaaatgtgactcgctgtaattcgccataactggaggcctaggccttgttgaaggcttcatcaggaaatgtgatgcagagattgtgctgctgtgcttcatattgttgccttatgggattatacttgaaatgcattgtgctgatgttcttgacagggcggagggatttctctttcctgagctcaccaaacttattccagtgttgatcgcaagctgttgatgcacaggcgtcttgtggcaagcccagcttcagtttatgttagacaatcagtacacatgctggtgtgttttccaatggccagtgataagaaattaaataagtatttgtgagatttgctattttttaataaagtaattgttttaaattaaaaaaaaaaaaaaaaaa

SEQ ID NO: 64 - DNA, 1491 bp, Homo sapiens
gccctgcgcggggacactcagagcccggtggggggaggaaggcggcatgccccagacggtgatcctcccgggccctgcggcctggggcttcaggctctcagggggcatagacttcaaccagcctttggtcatcaccaggattacaccaggaagcaaggcggcaggtgccaacctgtgtcctggagatgtcatcctggctattgacggctttgggacagagtccatgactcatgctgatgcgcaggacaggattaaagcagcagctcaccagctgtgtctcaaaattgacaggggagaaactcacttatggtctccacaagtatctgaagatgggaaagcccatcctttcaaaatcaacttagaatcagaaccacaggacgggaactactttgaacacaagcataatattcggcccaaacctttcgtgatcccgggccgaagcagtggatgcagcactccctccgggattgactgtggcagtggacgcagcaccccttcttctgtcagtactgttagtaccatttgcccaggtgacttgaaagttgcggctaagctggcccctaacattcctttggaaatggaacttcctggtgtgaagattgtacatgctcagtttaatacacctatgcagttgtactcagatgacaatattatggaaacactccagggtcaggtttcaacagccctaggggaaatacctttgatgagcgagcccacagcctcggtgccccccgagtcggacgtgtaccggatgctccacgacaatcggaatgagcccacacagcctcgccagtcgggctccttcagagtgctccagggaatggtggacgatggctctgatgaccgtccggctggaacgcggagtgtgagagctccggtgacgaaagtccatggcggttcaggcggggcacagaggatgccgctctgtgacaaatgtggcagtggcatagtcggtgctgtggtgaaggcgcgggataagtaccggcaccctgagtgcttcgtgtgtgccgactgcaacctcaacctcaagcaaaagggctacttcttcatagaaggggagctgtactgcgaaacccacgcaagagcccgcacaaaacccccaagaggctatgacacggtcactctgtatcccaaagcttaagtctctgcaggcgtggcacacgcacgcacccacccacgcgcacttacacgagaagacattcatggctttgggcagaaggattgtgcagattgtcaactccaaatctaaagtcaaggctttagacctttatcctattgtttattgaggaaaaggaatgggaggcaaatgcctgctatgtgaaaaaaacatacacttagctatgttttgcaactctttttggggctagcaataatgatatttaaagcaataattttttgtatgtcatactccacaatttacatgtatattacagccatcaaacacataaacatcaagatatttgaaggactctaattgtctttccttgacaa

SEQ ID NO: 65 - DNA, 958 bp, Homo sapiens
gtgggacgcgccgagccggaggctgcaggatgatgcggttcatgctattattcagccggcagggaaaactgcggctgcaaaaatggtacctggccacttcggacaaggaacggaagaagatggtgcgcgagctcatgcaggttgtcctggctcgaaagcccaagatgtgcagcttcctggagtggagggacctcaaagttgtctataagagatatgccagcctctacttctgctgcgccatcgagggccaagacaatgagctcatcacactggagctgatccaccgatacgtggagctcttagacaaatactttggcagtgtgtgcgagctggacatcatcttcaactttgagaaggcctacttcatcctggatgagtttttgatggggggggatgtccaggacacctccactttccccttttcccactgaaggttttagaagctaggaggcaggaaaatgtgacccagatgggggtgctatttggcttttattccctgcctttgcagaactgatgtcaccccagatgtccttccctccctaataactgtaaatatataaatatgtcaggttaaagggaaaaggtgttcagggcacttcttgtcctctctgtcccataacctacctccaccctccccctagccagccaggcagcttctctgcctgggaggggagcctggacccccctctttctccttggctgcagtggggcctttatccagtgccagggaggaacaacatagttaatttttttctaaccttgccactttgagggaaggaagggttgggggaagggcaagctttatgggaccctggtcctggccctggcctttcactccagttctgggtgaggcaggagctgggaggggtggggagggggagggggaagtgtctgcctttatgtcctttcttctgaaataaaaggaaaagcatttctggaaaaaaaaaaaaaaaaaaaa

SEQ ID NO: 66 - DNA, 2244 bp, Homo sapiens
gcacgggacaggccgggccacacccaccggggcgagctcggagggcggcgctctgggcggagggcccggcggctcggcccagggcgcgttacctcgtcgccggggccggagagggcgggcggaggcacggggcctggaggcgccaggcggaggatgcgggcgacacggtggcggcggcgaccgcgcgaccgggcgggcgggcgggcaggggcgagcggagggagggagcggactgcggcaggatctgtcgaggaaaaatcttgcggccggcgattccccgccttttaagcgcagcctgcactccccccaccccacgcaggggcgggccttccccaacgcgggcgcccactggccgccgcgcgccgctcccctccagctcgcctgcgcctctcactctccgtcagccgcattgcccgctcggcgtccggcccccgacccgcgctcgtccgcccgcccgcccgcccgcccgcgccatgaacgccaaggtcgtggtcgtgctggtcctcgtgctgaccgcgctctgcctcagcgacgggaagcccgtcagcctgagctacagatgcccatgccgattcttcgaaagccatgttgccagagccaacgtcaagcatctcaaaattctcaacactccaaactgtgcccttcagattgtagcccggctgaagaacaacaacagacaagtgtgcattgacccgaagctaaagtggattcaggagtacctggagaaagctttaaacaagtaagcacaacagccaaaaaggactttccgctagacccactcgaggaaaactaaaaccttgtgagagatgaaagggcaaagacgtgggggagggggccttaaccatgaggaccaggtgtgtgtgtggggtgggcacattgatctgggatcgggcctgaggtttgccagcatttagaccctgcatttatagcatacggtatgatattgcagcttatattcatccatgccctgtacctgtgcacgttggaatttttattactggggtttttctaagaaagaaattgtattatcaacagcattttcaagcagttagttccttcatgatcatcacaatcatcatcattctcattctcattttttaaatcaacgagtacttcaagatctgaatttggcttgtttggagcatctcctctgctcccctggggagtctgggcacagtcaggtggtggcttaacagggagctggaaaaagtgtcctttcttcagacactgaggctcccgcagcagcgcccctcccaagaggaaggcctctgtggcactcagataccgactggggctgggcgccgccactgccttcacctcctctttcaacctcagtgattggctctgtgggctccatgtagaagccactattactgggactgtgctcagagacccctctcccagctattcctactctctccccgactccgagagcatgcattaatcttgcttctgcttctcatttctgtagcctgatcagcgccgcaccagccgggaagagggtgattgctggggctcgtgccctgcatccctctcctcccagggcctgccccacagctcgggccctctgtgagatccgtctttggcctcctccagaatggagctggccctctcctggggatgtgtaatggtccccctgcttacccgcaaaagacaagtctttacagaatcaaatgcaattttaaatctgagagctcgctttgagtgactgggttttgtgattgcctctgaagcctatgtatgccatggaggcactaacaaactctgaggtttccgaaatcagaagcgaaaaaatcagtgaataaaccatcatcttgccactaccccctcctgaagccacagcagggtttcaggttccaatcagaactgttggcaaggtgacatttccatgcataaatgcgatccacagaaggtcctggtggtatttgtaactttttgcaaggcatttttttatatatatttttgtgcacatttttttttacgtttctttagaaaacaaatgtatttcaaaatatatttatagtcgaacaattcatatatttgaagtggagccatatgaatgtcagtagtttatacttctctattatctcaaactactggcaatttgtaaagaaatatatatgatatataaatgtgattgcagcttttcaatgttagccacagtgtattttttcacttgtactaaaattgtatcaaatgtgacattatatgcactagcaataaaatgctaattgtttcatggta

SEQ ID NO: 67 - DNA, 1391 bp, Homo sapiens
gaattccaccaacgatctcccagtgggcccaagcggagggtttcttccacgcttcggcccactgggagatcgttgacgctcaaatgcttgatgactccattggggtcaattatgaagagacctctgcatgatcatttatcctcatcagtgcctcaacagtaccagaactagaacagtctaacttcttcccttttaggtctttaattttccttttaataaaatatttattaagcgtaatcatatgcttaaaggtggggttttcactgttgtgcaaaaaacttatcatctcttactgatgacagatgctttaacaaaggcagtactggaccaggtcaccataaaacatgcagtatggtcacacttacaagttcacatagtgccctgaatgttacacagtatcggaaagtcactgaactagagagagcaaagactattagtgacttggcaagcattctttgagctgctgtatcacatcttggcaagaaacttataggcaaatgggaagagacagaggtgtattttatctaggttcaacaactgtttattatgaatgaattattgggtaaatggggggaaatcccacgggaaaaatcttcatagaaagaatgtacaggctctaagtctatgcaaaacagaaaaccatgcccatcacttttaatcatgtagcagcatgtaatgagatgaaccacgctaccacagtggtctgtgtttatcttctgtgttggtgttactgtgacagatgcagatatgtttagcctagaagtttttttggttgtttggtttaaatatagggtctcactgtattgcccacgctggagtgcagtgctcttctcaggtgtgatcacagcaggctgcagcctcgaacttctggctcaactgatcctcccacctcagactcccaagtagcgtgactataggtgtgtgtcactgtgtccggttatttaacctacaggttttaacagtctgtcttaaaaggatgtggaaatttcaggtatcaatcactcatggaaaaggcaggttagagaaaactcaggataaaagatgcttctccctccctgggtcaggcactgggagcctggggtttgaggtgaaactgttcccagagggtgcagccagctgaagtccaccaatagaaggtgaggcagagctgggacagagcagggcccatagactcccaaaagtctttatcttataagccagactcagcttctctctcttgttaatctcaatattaaaacgggtacagaggtaactgcaaaattagtgagttctcatagggaaagggaccgtaggagaaaaatagccagtaccctttctctggccattgacaattctgaaagacctaggcattcgtttgataatctctttaaagtttaaaaaaaaaaaaaaaa

SEQ ID NO: 68 - DNA, 1698 bp, Homo sapiens
gtccggtccgtctcctagtgtccggaatcggctgtcagcctccctggctgttagtaccttctttcccggagtcctggtccacgagttggatttactgctgtcgcgggtgggcctcacgccattccctgtccctcggccccctgagtgagtccggtctcccggcgaaagtgagcgaggtttgcccggagcgcgcacgaggggaaaatgcctaaaaaaaagactggtgcgaggaagaaggctgagaaccgccgagaacgtgaaaaacaactaagagcatcaagaagcactatagatttagctaaacatccatgtaatgcctcaatggaatgtgacaagtgtcagaggcggcagaagaatagagcattttgctacttttgtaattctgtacagaagttaccaatttgtgcacagtgtgggaaaacaaagtgcatgatgaagtcttcagactgtgtcataaagcatgctggtgtatacagtactggccttgcaatggtgggtgcaatatgtgacttctgtgaagcttgggtttgccatggtaggaaatgtctcagtacacatgcttgtgcctgccctcttaccgatgctgagtgtgttgaatgtgaacgaggcgtgtgggaccatggaggcagaatattcagttgttctttttgccataactttctctgtgaagatgatcaatttgagcatcaagccagctgccaggttttagaggcagaaacatttaaatgtgtttcatgcaatcggcttggtcagcactcatgtctccgttgtaaggcttgtttctgtgatgatcatacaaggagcaaagtgtttaagcaagaaaaaggaaaacagcctccttgtcctaaatgtgggcatgaaactcaggagactaaggaccttagcatgtcaacacgctccctgaaatttggcaggcagactggaggtgaagagggagatggagcttctgggtatgatgcttattggaagaacctttcatctgataagtatggtgataccagctaccacgatgaggaggaggatgagtatgaagcagaggatgatgaagaggaagaagatgaaggcagaaaggattcagatactgagtcatcagatttgtttactaatttgaatttaggaaggacctatgctagtggctatgctcactatgaggaacaagagaactaggggagctgctctggtggccgtgtgtgagaggagcatgagtgagtgtgtgtgcttgatgaattgtgtgtggttgttcaaaagtaccttagccacttagccttgtgcagaagactagttacacttaatgggccaagcaatagggtgtagcgtttttatagaactgataatcaggcttatggcataagaaaaatgagtttcaaatttaagatgtttattgatcgaagcaattgaagtatcatggattggattgttactgatttcagtaaagtatgttttgccaattagatacatatatacaagataaaggaataggatggtaatatatttgtttgaaattaaattactgtttttattaaaaaatactgcttcattgggctgattttgtaaaatgtaatgagtaaaatgaattactgtatttttccttttatgtccacagaatgagagtcatatgttgttatattctaaattttcattaaatattcatgtcaccttgagttgtcatgataagtaaaaaaaaaaaaaaaaaaaaaa

SEQ ID NO: 69 - DNA, 1851 bp, Homo sapiens
cacaggccgacgtcgagagggcctgctttactcctcctctttctcctccttctcccgcggcttctgcgcgagaggcgtcgccgggatctgggttttggaagaaggatctttgtgggaagacagggtgaatttatcacagaggaataacgagggagaggagaaaggtttcctaaagacaaaaaaaatggaggaatctgtaaaccaaatgcagccactgaatgagaagcagatagccaattctcaggatggatatgtatggcaagtcactgacatgaatcgactacaccggttcttatgtttcggttctgaaggtgggacttattatatcaaagaacagaagttgggccttgaaaatgctgaagctttaattagattgattgaagatggcagaggatgtgaagtgatacaagaaataaagtcatttagtcaagaaggcagaaccacaaagcaagagcctatgctctttgcacttgccatttgttcccagtgctccgacataagcacaaaacaagcagcatttaaagctgtttctgaagtttgtcgcattcctacccatctctttacttttatccagtttaagaaagatctgaaggaaagcatgaaatgtggcatgtggggtcgtgccctccggaaggctatagcggactggtacaatgagaaaggtggcatggcccttgctctggcagttacaaaatataaacagagaaatggctggtctcacaaagatctattaagattgtcacatcttaaaccttccagtgaaggacttgcaattgtgaccaaatatattacaaagggctggaaagaagttcatgaattgtataaagaaaaagcactctctgtggagactgaaaaattattaaagtatctggaggctgtagagaaagtgaagcgcacaagagatgagctagaagtcattcatctaatagaagaacatagattagttagagaacatcttttaacaaatcacttaaagtctaaagaggtatggaaggctttgttacaagaaatgccgcttactgcattactaaggaatctaggaaagatgactgctaattcagtacttgaaccaggaaattcagaagtatctttagtatgtgaaaaactgtgtaatgaaaaactattaaaaaaggctcgtatacatccatttcatattttgatcgcattagaaacttacaagacaggtcatggtctcagagggaaactgaagtggcgccctgatgaagaaattttgaaagcattggatgctgctttttataaaacatttaagacagttgaaccaactggaaaacgtttcttactagctgttgatgtcagtgcttctatgaaccaaagagttttgggtagtatactcaacgctagtacagttgctgcagcaatgtgcatggttgtcacacgaacagaaaaagattcttatgtagttgctttttccgatgaaatggtaccatgtccagtgactacagatatgaccttacaacaggttttaatggctatgagtcagatcccagcaggtggaactgattgctctcttccaatgatctgggctcagaagacaaacacacctgctgatgtcttcattgtattcactgataatgagacctttgctggaggtgtccatcctgctattgctctgagggagtatcgaaagaaaatggatattccagctaaattgattgtttgtggaatgacatcaaatggtttcaccattgcagacccagatgatagagccttgcaaaataccctactaaataaatcattttagacatggagtgcaggtggacactgtgtgaactgtttttggtcagttattgtagaaattgatagatgtaccaaataaactctatgcacatt

SEQ ID NO: 70 - DNA, 3686 bp, Homo sapiens
gaattccgattaatcctccagttggttgtccctgccgtctcggaagggttagcacacagccaggtctgtttttgatgtatgtaattgaagatttataaagaaaagcttctcctctgcctcatccacagtcattttttttccaatgccagttcccagcaggcatataaatattggtcgttctcagagctgggatgctgctgggtggtacgagggcccctgggagaacgccgagtccctgcggcctctggggaggagaagctccctgacgtatggcacagcagaggggacttggtttgagccaaaccaccgaccacaggacgctgccctgcccgtggccgccgagccctacctgtaccgggaggccgtttataactcagtggctgcaagaaaggggtctactcctgacttcaccttctacgacagcagacaggcagtgatgtctggtcgcagccccctgctgccacgggagtactacagtgatccgtctggagctgctagggtacccaaagagcctcccctctatcgggacccaggagtcagccggccggtccccagctacggagtgcttggcagcagaacgtcatgggatccaatgcaaggccggtcacctgccctgcaggacgccggtcacctgtaccgggatcctggaggtaaaatgatccctcaggggcggcagacacagagcagggctgcatctcccgggcggtatggacgggagcagcccgacaccaggtatggggcggaggtgcctgcctaccccctcagccaggtcttcagcgacatcagcgaaagacccattgaccctgcccctgccagacaggtggccccgacgtgcctggttgtggaccccagttcagctgctgcccccgaaggcagcacaggggtggccccaggggccctgaatcgtggctacgggcctgcccgggaaagcatcccatccaagatggcttacgagacttacgaagctgacctgtccaccttccagggtcctggtggcaagaggaccgtgctccctgagttcctggcctttctgcgggcggaggggctggcagaggccacgctgggagccctactgcagcagggctttgactccccggccgtcctggctaccctggaggacgcggatatcaagtctgtcgcacccaacctgggccaggcccgtgttctgagccgcctggccaatagctgcaggaccgaaatgcagctgcggaggcaggaccgggggggcccgctgccccgggcgcggtccagcagcttcagccaccgaagcgaactgctccatggtgacttggcttctctgggcgctgcggctcctctgcagacagcatccccccgagctggagacccggctcgccgtccctccagcgcaccatctcagcacctcctggagacggcagccacctattctgcccctggcgtgggcacccatgccccacacttcccctccaactccgggtacagctctcccaccccttgcgccctgacagcgcgtctgagccccacgcaccccctgcaggcaggggtggccttgactaacccgggcccctcaaacccccttcacccaggccccagaacagcttactccacggcatacacggtgcccatggagctgctaaagagggagcgcaacgtggccgcctctccgctgcccagccctcacggcagcccccaggtcttgcggaagccaggtgcacccctggggccatccaccctgccgccggccagccagagcctccacacgcctcactcaccgtacgagaaggtggcccggcgcacaggggcacccatcatcgtgtccaccatgcttgcaccagaaccaagtatccgcccccagatcatgaacggccccctgcacccccgccccctggtggcgctgctggacggccgcgactgcactgtggagatgcccatcctgaaggacctggccactgtggccttctgtgacgcgcagtcgacgcaggaaatccacgagaaggttctaaacgaagccgtgggcgccatgatgtaccacaccatcaccttcaacagggaggacctggagaagttcaaggccctgagagtgatcgtgcggataggcagtggctatgacaacgtgaacatcaaggctgccggcgagctcggaattgccgtgtgcaacatcccgtctgcagccgtggaagagacagcggactctaccatctgccacatcctcaacctgtaccggaggaacacgtggctgtaccaggcactgcgggaaggcacgcgggttcagagcgtggagcagatccgcgaggtggcctcgggagcggcccgcatccgtggggagacgctgggcctcattggctttggtcgcacggggcaggcggttgcagttcgagccaaggcctttggattcagcgtcatattttatgacccctacttgcaggatgggatcgagcggtccctgggcgtgcagagggtctacaccctgcaggatttgctgtatcagagcgactgcgtctccttgcactgcaatctcaacgaacataaccaccacctcatcaatgactttaccataaagcagatgaggcagggagcattccttgtgaacgcagcccgtggcggcctggtggacgagaaagccttagcacaagccctcaaggagggcaggatacgaggggcagccctcgacgtgcatgagtcagagcccttcagctttgctcagggtccgttgaaagatgccccgaatctcatctgcactcctcacactgcctggtacagtgagcaggcgtcactggagatgagggaggcagctgccaccgagatccgccgagccatcacaggtcgcatcccagaaagcttaagaaattgtgtgaacaaggaattctttgtcacatcagcgccttggtcagtaatagaccagcaagcaattcatcctgagctcaatggtgccacatacagatatccgccaggcatcgtgggtgtggctccaggaggacttcctgcagccatggaagggatcatccctggaggcatcccagtgactcacaacctcccgacagtggcacatccttcccaagcgccctctcccaaccagcccacaaaacacggggacaatcgagagcaccccaacgagcaatagcagagaatgccagaaggtaatcactcagatacacttgggaccaagagacagtgaaaaatagatgaactaagagaaaaagaatcggatggtctttgtaactgattctggacatatgcatcattgatgttgcagtgttgaaactacaagagctagaaaactgaagatgtcgtctgcttacggaagcgctgaaagactaggatgtgatttattaacgaccaacttctgttattgtgtgttaagtttttcatctgtgcatcaaatcacaaaaagaataaatagagctttttcctttatcagtcccttgggcacagcaggtcctgaacaccctgctctacaatgttgcatcaagagttcaaacaacaaaataaaaaatattaagaggaaatccccatcctgtgacttgagtcccttaagtctacaggggctgggtgacctctttttgctaataggaaaatcacattactacaaaatggggaaaaaactgtttgcctgtggtagacacctgcacgcataggattgaagacagtacaggctgctgtacagagaagcgcctctcacatctgaactgcatactgagccggaattc

SEQ ID NO: 71 - DNA, 3186 bp, Homo sapiens
cgactacgaccagtgaggcggccgccgcagcccaggcgcgggggcgacgacaggttaaaaatctgtaagagcctgattttagaattcaccagctcctcagaagtttggcgaaatatgagttattaagcctacgctcagatcaaggtagcagctagactggtgtgacaacctgtttttaatcagtgactcaaagctgtgatcaccctgatgtcaccgaatggccacagcttgtaaaagagagttacagtggaggtaaaaggagtggcttgcaggatggagaagctgcaccagtgttattggaagtgagccaccatttgaatttgctagctcatgctgcagtattcagattatgccagcaggtttattttttgttttgcaagccagctctgcctccttacagtatgacatctgatgctggagggtcgcactttcaaaaatgagtcagctggtacatggggttatcatcaatttttagctcttctgtctgggagatacaagtttggaagcaatcttggggtacttacccacaaggctggtggagaccagatcaggagaacctcagtctgacgacattgaagctagccgaatgaagcgagcagctgcaaagcatctaatagaacgctactaccaccagttaactgagggctgtggaaatgaagcctgcacgaatgagttttgtgcttcctgtccaacttttcttcgtatggataataatgcagcagctattaaagccctcgagctttataagattaatgcaaaactctgtgatcctcatccctccaagaaaggagcaagctcagcttaccttgagaactcgaaaggtgcccccaacaactcctgctctgagataaaaatgaacaagaaaggcgctagaattgattttaaagatgtgacttacttaacagaagagaaggtatatgaaattcttgaattatgtagagaaagagaggattattcccctttaatccgtgttattggaagagttttttctagtgctgaggcattggtacagagcttccggaaagttaaacaacacaccaaggaagaactgaaatctcttcaagcaaaagatgaagacaaagatgaagatgaaaaggaaaaagctgcatgttctgctgctgctatggaagaagactcagaagcatcttcctcaaggataggtgatagctcacagggagacaacaatttgcaaaaattaggccctgatgatgtgtctgtggatattgatgccattagaagggtctacaccagattgctctctaatgaaaaaattgaaactgcctttctcaatgcacttgtatatttgtcacctaacgtggaatgtgacttgacgtatcacaatgtatactctcgagatcctaattatctgaatttgttcattatcgtaatggagaatagaaatctccacagtcctgaatatctggaaatggctttgccattattttgcaaagcgatgagcaagctaccccttgcagcccaaggaaaactgatcagactgtggtctaaatacaatgcagaccagattcggagaatgatggagacatttcagcaacttattacttataaagtcataagcaatgaatttaacagtcgaaatctagtgaatgatgatgatgccattgttgctgcttcgaagtgcttgaaaatggtttactatgcaaatgtagtgggaggggaagtggacacaaatcacaatgaagaagatgatgaagagcccatccctgagtccagcgagctgacacttcaggaacttttgggagaagaaagaagaaacaagaaaggtcctcgagtggaccccctggaaactgaacttggtgttaaaaccctggattgtcgaaaaccacttatcccttttgaagagtttattaatgaaccactgaatgaggttctagaaatggataaagattatacttttttcaaagtagaaacagagaacaaattctcttttatgacatgtccctttatattgaatgctgtcacaaagaatttgggattatattatgacaatagaattcgcatgtacagtgaacgaagaatcactgttctctacagcttagttcaaggacagcagttgaatccatatttgagactcaaagttagacgtgaccatatcatagatgatgcacttgtccggctagagatgatcgctatggaaaatcctgcagacttgaagaagcagttgtatgtggaatttgaaggagaacaaggagttgatgagggaggtgtttccaaagaattttttcagctggttgtggaggaaatcttcaatccagatattggtatgttcacatacgatgaatctacaaaattgttttggtttaatccatcttcttttgaaactgagggtcagtttactctgattggcatagtactgggtctggctatttacaataactgtatactggatgtacattttcccatggttgtctacaggaagctaatggggaaaaaaggaacttttcgtgacttgggagactctcacccagttctatatcagagtttaaaagatttattggagtatgaagggaatgtggaagatgacatgatgatcactttccagatatcacagacagatctttttggtaacccaatgatgtatgatctaaaggaaaatggtgataaaattccaattacaaatgaaaacaggaaggaatttgtcaatctttattctgactacattctcaataaatcagtagaaaaacagttcaaggcttttcggagaggttttcatatggtgaccaatgaatctcccttaaagtacttattcagaccagaagaaattgaattgcttatatgtggaagccggaatctagatttccaagcactagaagaaactacagaatatgacggtggctataccagggactctgttctgattagggagttctgggaaatcgttcattcatttacagatgaacagaaaagactcttcttgcagtttacaacgggcacagacagagcacctgtgggaggactaggaaaattaaagatgattatagccaaaaatggcccagacacagaaaggttacctacatctcatacttgctttaatgtgcttttacttccggaatactcaagcaaagaaaaacttaaagagagattgttgaaggccatcacgtatgccaaaggatttggcatgctgtaaaacaaaacaaaacaaaataaaacaaaaaaaaaaaaaaaaaa

SEQ ID NO: 72 - DNA, 3295 bp, Homo sapiens
gacagacgctgggagcggccgaggcgagtgatttcttctgacttgagcctgcagtgtgctgtgagagatctaccactagattatctcaactttggtctcctgggaccactcgttgctgacagtcagaaactgaattcttgccgccaggatggggaaacagaacagcaagctgcgcccggaggtcatgcaggacttgctggaaagcacagactttacagagcatgagatccaggaatggtataaaggcttcttgagagactgccccagtggacatttgtcaatggaagagtttaagaaaatatatgggaactttttcccttatggggatgcttccaaatttgcagagcatgtcttccgcaccttcgatgcaaatggagatgggacaatagactttagagaattcatcatcgccttgagtgtaacttcgagggggaagctggagcagaagctgaaatgggccttcagcatgtacgacctggacggaaatggctatatcagcaaggcagagatgctagagatcgtgcaggcaatctataagatggtttcctctgtaatgaaaatgcctgaagatgagtcaaccccagagaaaagaacagaaaagatcttccgccagatggacaccaatagagacggaaaactctccctggaagagttcatccgaggagccaaaagcgacccgtccattgtgcgcctcctgcagtgcgacccgagcagtgccggccagttctgagccctgcgcccaccaatcgaattgtagagctgcttgtgttcccttttgattcttctttttaacaattttttttttttgccaaacaatatcaatggtgatgccgtcccctgtgcggtctgatgcgccttcctccgtgacgccttcagcttcttttgtcgtggatgcttcgtgggaatgcccagagccccagtgtgcttgtggagagcatggacagacttcgtggtgttcattgtttgatgatttttaatcgttactattatttttttttattctaatgtctctgttctaaaacgtaagactcgggggttggggcaaaagaagggaaacccatccagtcctgtgattctattgcaagcttcaaggggcttttgtttgaaagacaaaactccccacctgaatctgttgtcacacgtgccgtaggggtgatggatggcaccggatgctggattccccaagaacaagttaccctctggggtgaggctattccagcgagctgggacatttccccatgggggcccactcccctctcttccccagcaggctgtagtttctaagctgtgaacatttcaagataaattaacagaggagaggaaaaagatggctcagctattttttcacaggtttacactagttgagctaatatgcgtgtctttggaaattaaacacaaatggtaacatattccaaaaccagacccatcttgttgcctattgtgataaaataaaaagacggctgtatataacatattgggtaatgcagaccaaattaagtgttttgccttgtttaaatgaaatgcatgtttagtgagcactaatacaatcttattccagaagactgtttttagtagcttattgtgaagtaagacaactataatgaatgtctgtcttgtttggaagtcatatctgtctttgcacaaatgtaccaatcgacaagtatattttatatattccataaaaatacaaagtaaccctgactagggcccaactttaattttgaatgcatttccagagtggccatgcctagagggcagatgcagagcaggtggtagtgggacaggacaattggagcacaggaatgttaacatgtatgacaggggaccagtagggtggtttccctctcaggcccagcagcccattgacagcattagactggcggcatggtgcttttctgagcagatcaatactctgcagactcgaaaaaacatcacatacattcttggaacttcccagtggtttaatctatgtgcatggttagggagccaggtctggaatattcagtttccctgcccctgttaaagaatcagaggttgggcagtcatcaaattcatcataaagacatgggcaagtgtgtctgtggtttccaaggcccccctatggagaatccaaaagtattttccattgccgtgctctttgaatgcagacttctatttccagaagtgacagcacaagtctgagttgctgtttggtctggtgacctcagacacactaatttgaattgaaagctaagagtaaaaatttgctggttacaggcgagtcatactcttgcaagtagttagcaaagggaggcccaaattctcaaggttgttgatggggaacttgccactaagagaaggcagagaggtccctagtgggtatatttgctgccaagccacttgccaaagaagaggaaccacagaaagagagacatcatgaccaggagaaaaatgtgactagacatgctaacctccaggtttttatatatgacttgagtctgctgtaattggcagcagaaatccaaatttgtatggtagaccaaaaagaaccaaatccatagggtgaaattttgagacctagactctgtaaaaataatcctagtcttcctccaggggtcagttcctcacagtggttctgtaccaaaacttgccaaattcctccatggccaagtgttaaaatctgtgtttggaaaatagcgaattaacctaagacacagaaggcagactgggtgaggagacctagcatgccctattggcagtgctcaggagctgcatcccacttttccctgctctgaatcgaagtcctagttccttcctttgattctcctttggtaggtggaatcagttaatgttttgagaaacctgcctgggctctgcccttagtcatgacatctcgctgagccagacccactctgttccttggaacctagagctggagtgaggagtagaggtctccggctattccagaaagaaaagtgagccacatgcaggctgatgaatgccgacacttccagaatgtatagaaatagtccctgtcctggcctgccactgaccctgtctgtattttctcggaggttgtttttctccttctccttcccaggaaggtctttgtatgtcgaatccagtgcactcaagtttggccaagggactccacagcacccagaagactgcatgcctcaaggtttatgtcactcctctgctgggctgttcattgtcattgctgtgttcagggacctttggaaataaaacctgttctgtcccaaataaaaccagcctgtgatgttcaagggactggaataaagtggcttacgacctg

SEQ ID NO: 73 - DNA, 639 bp, Homo sapiens
atgaaggccactatcatcctccttctgcttgcacaagtttcctgggctggaccgtttcaacagagaggcttatttgactttatgctagaagatgaggcttctgggataggcccagaagttcctgatgaccgcgacttcgagccctccctaggcccagtgtgccccttccgctgtcaatgccatcttcgagtggtccagtgttctgatttgggtcttcctccttcccttacggaattacatcttgatggcaacaaaatcagcagagttgatgcagctagcctgaaaggactgaataatttggctaagttgggattgagtttcaacagcatctctgctgttgacaatggctctctggccaacacgcctcatctgagggagcttcacttggacaacaacaagcttaccagagtacctggtgggctggcagagcataagtacatccaggttgtctaccttcataacaacaatatctctgtagttggatcaagtgacttctgcccacctggacacaacaccaaaaaggcttcttattcgggtgtgagtcttttcagcaacccggtccagtactgggagatacagccatccaccttcagatgtgtctacgtgcgctctgccattcaactcggaaactataagtaa

SEQ ID NO: 74 - DNA, 2190 bp, Homo sapiens
ataaagcctgaggcggcggcagcggcggagttggcggcttggagagctcgggagagttccctggaaccagaactcggaccttctcgcttctgtcctccgtttagtctcctcctcggcgggagccctcgcgacgcgcccggcccggagcccccagcgcagcggccgcgtttgaaggatgacctctaggaagaaagtgttgctgaaggttatcatcctgggagattctggagtcgggaagacatcactcatgaaccagtatgtgaataagaaattcagcaatcagtacaaagccacaataggagctgactttctgaccaaggaggtgatggtggatgacaggctagtcacaatgcagatatgggacacagcaggacaggaacggttccagtctctcggtgtggccttctacagaggtgcagactgctgcgttctggtatttgatgtgactgcccccaacacattcaaaaccctagatagctggagagatgagtttctcatccaggccagtccccgagatcctgaaaacttcccatttgttgtgttgggaaacaagattgacctcgaaaacagacaagtggccacaaagcgggcacaggcctggtgctacagcaaaaacaacattccctactttgagaccagtgccaaggaggccatcaacgtggagcaggcgttccagacgattgcacggaatgcacttaagcaggaaacggaggtggagctgtacaacgaatttcctgaacctatcaaactggacaagaatgaccgggccaaggcctcggcagaaagctgcagttgctgagggggcagtgagagttgagcacagagtcctccacaaaccaagaacacacgtaggccttcaacacaattcccctctcctcttccaaacaaaacatacattgatctctcacacccagctgccaaaagaaaaccccatcaaacacagttacaccccacatatctctcacacacacacacacacgcacacacacacacacagatctgacgtaatcaaactccagcccttgcccgtgatggctccttggggtctgcctgcccacccacatgagcccgcgagtatggcagcaggacaagccagcggtggaagtcattctgatatggagttggcattggaagcttattctttttgttcactggagagagagagaactgtttacagttaatctgtgtctaattatctgattttttttattggtcttgtggtctttttaccccccctttcccctccctccttgaaggctaccccttgggaaggctggtgccccatgccccattacaggctcacacccggtctgatcaggctgagttttgtatgtatctatctgttaatgcttgttacttttaactaatcagatctttttacagtatccatttattatgtaatgcttcttagaaaagaatcttatagtacatgttaatatatgcaaccaattaaaatgtataaattagtgtaagaaattcttggattatgtgtttaagtcctgtaatgcaggcctgtaaggtggagggttgaaccctgtttggattgcagagtgttactcagaattgggaaatccagctagcggcagtattctgtacagtagacacaagaattatgtacgccttttatcaaagacttaagagccaaaagcttttcatctctccaggggaaaaactgtctagttcccttctgtgtctaaattttccaaaacggttgatttgcataatacagtggtatgtgcaatggataaattgccgttatttcaaaaattaaaattctcattttctttcttttttttcccccctgctccacacttcaaaactcccgttagatcagcattctactacaagagtgaaaggaaaaccctaacagatctgtcctagtgattttacctttgttctagaaggcgctcctttcagggttgtggtattcttaggttagcggagctttttcctcttttccccacccatctccccaatattgcccattattaattaacctctttctttggttggaaccctggcagttctgctcccttcctaggatctgcccctgcattgtagcttgcttaacggagcacttctcctttttccaaaggtctacattctagggtgtgggctgagttcttctgtaaagagatgaacgcaatgccaataaaattgaacaagaacaatgaaaaaaaaaaaaaaaaa

SEQ ID NO: 75 - DNA, 3040 bp, Homo sapiens
ggcgcgcggcgagctgagggtggcggcggtcgacatgttccaggtcccggatagcgagggcggccgcgccggctccagggccatgaagcccccaggaggagaatcgagcaatctttttggaagtccagaagaagccactccttccagcaggcctaataggatggcatctaatatttttggaccaacagaagaacctcagaacatacccaagaggacaaatcccccagggggtaaaggaagtggtatctttgacgaatcaacccccgtgcagactcgacagcacctgaacccacctggagggaagaccagcgacatttttgggtctccggtcactgccacttcacgcttggcacacccaaacaaacccaaggatcatgttttcttatgtgaaggagaagaaccaaaatcggatcttaaagctgcaaggagcatcccggctggagcagagccaggtgagaaaggcagcgccagaaaagcaggccccgccaaggagcaggagcccatgcccacagtcgacagccatgagccccggctggggccgcggcctcgctctcacaacaaggtcctgaacccaccgggaggcaaatccagcatctccttctactaagagaagccactgctccacccggagccagaccagaaactcaagagatagggtagccatgttttcatttccttttgcccaaatgagcggggtgggaagagggttagtcttatgtgagcctggctgctcagcgtctcctggccgtcatgacagctgcttggagacccgtgccttccagatggctgggagatgcctctgtggggatgaaatggggcacccctggccatcactcatgtgtagtccaggtttgagaggaactggaaggggggtgagggtggggaggtggggcagggcatggtccttggatcaacagcccgccagctgattggatgtctaggaatgactgaaagaaaccaaaacagcctgtccactgctgctgtgggatggaggaggcgtaagcagaaacactaacagtatattgacctcttagcagaaccgcttccattctggagatcacggctgctaaatccagcatccccacttcattttacccccagcatattgttctgtagtcttttcttgaaacatcttgattgcttttcctcggcagctttcaaaaaaccaaataataatagttatccgtcttctacttcatggaagattgttttggtgccctgaccctctgaagtgcccagttcctgccatctgaaacctcggcctgatctgatctcatgttggaatctgcctgtctttcacacagggctggtcttggtcctttacatgccagttttgcttgtgaattcttgcttttttcctctcatcagccttaagtttaggcgtttgttgttctccagtgatgtagacagttcccttcacaagtcacagttcttcccataaatgaggcccgctgacctctgcgggactttaaaaatctattcagatatttccgagtaagtggcttgtttaaattcttcctgtgtctttctttattccttaattggttggtggaaagaagagatgcttgggaaccttgggttcttaggtttggattctttaataatatctaaaaagctaaattttaaataccagctttacataaatgattgttgactctggtctgtttctgacacctttccagaaaaaagtcaattgttcaggtacaccaaagaggaagaagagctgtggaggccaccctctacaaagctttatagaacttctggatctaactcacaaacaagcttccagaagagactagagaccttaggccaggagatgaaggagttcagtagcaaagtcacacctgtccaattccctgagctttgctcactcagctaatgggatggcaaaggtggtggtgctttcatcttcaggcagaagcctctgcccatccccctcaagggctgcaggcccagttctcatgctgcccttgggtgggcatctgttaacagaggagaacgtctgggtggcggcagcagctttgctctgagtgcctacaaagctaatgcttggtgctagaaacatcatcattattaaacttcagaaaagcagcagccatgttcagtcaggctcatgctgcctcactgcttaagtgcctgcaggagccgcctgccaagctccccttcctacacctggcacactggggtctgcacaaggctttgtcaaccaaagacagcttcccccttttgattgcctgtagactttggagccaagaaacactctgtgtgactctacacacacttcaggtggtttgtgcttcaaagtcattgatgcaacttgaaaggaaacagtttaatggtggaaatgaactaccatttataacttctgtttttttattgagaaaatgattcacgaattccaaatcagattgccaggaagaaataggacgtgacggtactgggccctgtgattctcccagcccttgcagtccgctaggtgagaggaaaagctctttacttccgcccctggcagggacttctgggttatgggagaaaccagagatgggaatgaggaaaatatgaactacagcagaagcccctgggcagctgtgatggagcccctgacattactcttcttgcatctgtcctgccttctttccctctgcgaggcagtggggtgggattcagagtgcttagtctgctcactgggagaagaagagttcctgcgcatgcaagccctgctgtgtggctgtcgtttacatttgggaggtgtcctgtatgtctgtacgttggggactgcctgtatttggaagatttaaaaacctagcatcctgttctcaccctctaagctgcattgagaaatgactcgtctctgtatttgtattaagccttaacacttttcttaagtgcattcggtgccaacattttttagagctgtaccaaaacaaaaagcctgtactcacatcacaatgtcattttgataggagcgttttgttatttttacaaggcagaatggggtgtaacagttgaattaaactagcaatcacgtgctcagagcttt

SEQ ID NO: 76 - DNA, 574 bp, Homo sapiens
  misc_feature (47)..(47): n is a, c, g, or t
  misc_feature (49)..(57): n is a, c, g, or t
  misc_feature (504)..(504): n is a, c, g, or t
  misc_feature (546)..(546): n is a, c, g, or t
  misc_feature (566)..(572): n is a, c, g, or t
ttcactttctagacgattacaaacaactatggccggaacctcctcancnnnnnnnnngcagagttccctaccctaagagaatgttaccacctgaacagtcctcggtgaatctgagaggagaggatggggtaaggcagaagcaccagctgtactactagaagggagcttttggtggtagatcccctggtgtctccaacctgactaggtggacagagctcaaagaggccctcttaccgctagcgaggtgataggacatctggcttgccacaaaggtctgttcgaccagacatatcctagctaagggatgtccaaacatcagaatgtgaggccaaccttctatcagagttaaacttttgacaagggaacaaatctcaaactgatccatcagtcatgtagctagctgtagagcttgcaacttaatagcagcagctgcccaatgccatgtgaagtaacaaactggtttttggtttttttttccccttcagttttaatgttatgtgtaantgtatttaaacccttatttaaataaaacttgttttcagaaanaaaaaaaaaaaaaaaaaaannnnnnnaa

SEQ ID NO: 77 - DNA, 6148 bp, Homo sapiens
cggacaccgacctgttcatggaatgtgaggaggaggagttggagccatggcagaaaatcagtgatgtcattgaggactctgtagttgaagattataattcagtggataaaactaccacagctggcaatcctttggtccagcaaggtggacagccactcatcctgacccagaatccagccccaggtctgggcacaatggttactcaaccagtattgaggcctgttcaggtcatgcagaatgccaatcatgtgactagttcccctgtggcctcacaaccaatatttatcactacgcagggatttcctgtaaggaatgtccggcctgtacaaaatgcaatgaatcaggttgggattgtgctgaacgtacagcaaggccaaacggttagaccaattacactagttccagccccaggtacccagtttgttaagccgacagttggagttccacaagtgttctcccagatgacccctgtgaggccaggctccacaatgcctgtgaggcccaccaccaacaccttcaccaccgtcatcccggccactcttaccattcgaagcaccgtcccacagtcccagtcccagcagaccaagtccactcccagcacttctaccactcccactgccacacagccaacctcactggggcaactagctgttcagtctccaggccagtcaaaccagaccacgaatcccaagctagctccctccttcccctctccacctgcagtgagcattgccagctttgtcactgtgaagcgacctggtgttacaggcgaaaatagcaatgaagtggccaaattggtgaatacccttaacaccatcccttccctgggccagagtcctgggccagtggtggtgtccaacaacagctctgctcatggctctcaaagaaccagcggacctgagtcttcaatgaaagtgacctcttccatcccagtatttgacctccaggatggtggacggaaaatatgtccacgatgtaatgctcaatttcgtgttactgaagctttgagaggtcacatgtgttactgttgcccagaaatggttgaataccagaagaaaggaaagtccctggattcagaacccagtgtcccatcagcagcaaagcccccatcccctgagaaaacagctcctgttgcttccacaccctcttctacacctattcctgctctgtcaccgcctaccaaagtaccagaaccaaatgagaacgtgggcgatgccgtccagaccaaactcattatgcttgtagatgacttctactatggacgggatggtggcaaagtagcccagctcacaaatttccctaaggtcgccacatctttccgatgcccacattgtaccaaaaggctaaaaaacaatattcgattcatgaaccatatgaaacaccacgtagaactcgatcagcagaacggtgaggtagatggtcacactatctgccagcactgttaccgccagttttccactcccttccagcttcagtgccacttggaaaatgttcatagtccctatgaatctactaccaagtgcaagatctgtgaatgggcgtttgaaagtgagccactatttctccagcatatgaaggatactcataagcctggagagatgccttatgtttgccaggtgtgtcaatatcgctcctcactctactctgaggtagatgtccattttcggatgatccatgaggatacccggcatctgctctgcccttattgcctgaaggtcttcaaaaatggcaatgcattccaacagcattacatgaggcaccagaagagaaatgtttatcactgcaacaaatgccggctgcagtttctctttgccaaggacaaaattgaacacaagcttcaacaccataaaaccttccgtaaacccaagcagctggagggcttgaaaccaggcaccaaggtgacaatccgggcttcccgagggcagccacgaactgttcctgtatcctctaatgatacacctcccagcgccttgcaggaggcagcaccgctgacctcctcaatggaccctctgcctgtcttcctttatccccctgtccagcgcagcatccagaagagagctgttaggaaaatgagtgtcatgggccggcagacatgcctggagtgcagcttcgagatcccagacttccctaatcatttccctacttacgtacactgctctctgtgtcgctatagcacctgctgttctcgagcttatgccaaccacatgatcaacaatcatgttccacggaagagccccaagtatttggctttgtttaaaaattctgtgagtggaatcaagctggcctgcacttcatgtacctttgttacctctgtgggcgatgctatggccaagcatttggtattcaacccctctcacagatccagcagcatcctgccacggggactcacttggatagctcactcaaggcatggccagactcgtgaccgagtgcatgaccggaacgtgaagaatatgtaccctcctccttccttccccactaacaaagctgccactgtgaaatctgcgggggccaccccagctgagcctgaagagctactaactcccttagccccagcactcccatcaccagcctcaactgcaaccccaccaccaacccccactcacccgcaggctttagcccttccaccgctggctacagagggagccgaatgtctgaatgttgatgatcaggatgaagggagcccagtcacccaagaacctgagctagcatcaggtggtggtggtagtggtggagttggcaaaaaggagcagctgtctgtgaagaagcttcgagtagtactgtttgctctatgctgcaatacagaacaggcagctgaacacttccgaaatccccagcgacgtattcgccgttggcttcgacgtttccaggcctcccagggggagaatctagagggcaaatatctgagctttgaggcagaagagaaactggctgagtgggtgctaacccagcgcgaacaacagctacctgtaaatgaggagaccttgttccagaaggccaccaaaataggacgttctttggaaggggggtttaagatctcctatgagtgggctgtgcgtttcatgctgcggcaccacctgactccccatgcccggcgagctgtggcccacaccctacctaaggatgtagcagagaatgcaggactcttcattgattttgtacaacggcagattcacaaccaggacttacccttgtctatgattgtggctattgatgagatctctttgttcctggatacagaggtgctgagcagtgatgatcgaaaggagaatgccctgcagacagtgggcacaggggaaccttggtgtgatgtagtcctagccattctggcagatggcactgtccttcccaccctggttttctacagagggcagatggatcagcctgctaacatgccagactccatattgctagaggcaaaggagagtggctacagtgatgacgagatcatggagctgtggtcaactcgagtgtggcagaagcacacagcttgccagcgcagcaaaggcatgcttgtgatggactgtcatcgcactcacttgtcagaagaggtactggctatgcttagtgcctctagcactttgcctgcagtggtcccagcaggctgtagctccaaaattcagccattagatgtatgcatcaaaagaactgtcaagaacttcctgcataaaaaatggaaggaacaggctcgggaaatggcagatactgcatgtgattctgatgtcctgcttcagctggtgcttgtctggctgggtgaagtgctaggtgtcattggggactgtccagagctagttcagcgctccttcctggtggctagtgttctgcctggccccgatggcaacattaactcacctacaagaaatgctgacatgcaggaggagctaattgcctccctagaggagcaactgaagctgagtggggaacattctgagtcttccactccacgacccagatcatctcctgaagagacaattgagcctgaaagtcttcaccagctctttgagggtgaaagtgagaccgagtctttctatggctttgaagaagctgacctagatctgatggagatttgagtgttggggtcatgagggggtgtggagtgggggtgggaacatgtgagggagggtaaaggggcttagggaaaagggggcataccaggtggggtatttggtttctattttttaattttataccaccactcccccctgaagttgacttacacttccctgtggatttgtggattaattaggaaaaccaatagtaatcacgtctgagccaaggagctggcccattggtcattcacttctgctaaaaacaggtttttgtgactttttttttttttaaatttaaatcactgtgtttggtatttttctgacaaaattaagaaaaagaaaaaaaattatttgtgggcaaatgttaaatttttttgtttccccttttacctcaattgtatcatagtactgggtttttttgtttgttttattgtgtggccaatgtctttgggcatgatgctatctaatcattgttaatgtgagaacatttctgaagatgggaaagacaaattatgtagctcacaaactggtttattatatatatggataaaaaacttttttcattgtggtcttaacacttttatataaaaatgaaaatggaaaaaaagtcccactgaactctctcttccttctccttttctttccttccctctccagagatgttggtttctacagcaaccctagatataaaattgtggctttaaaaatgcatgaaaccacctttaattatccagaatgaatagatttgtcttttcctcaccaccttccctccaaaacatgacataaacaatattttttgcacttgtgatccttggcccctttccccattctcaacaccatccatccctctggacaaaggatcatacaggtgttattagcaagcaagagatactgaagcgatcaaacagttttagggtggaagccattcccagtttgagtcttcatcctgtaagcccccaggggcagtccctgctttactgaacttcatcctgttagatggagagcatgcctgtttaagggattactggtcctacagccaggagctaattgttcaagaagtgttgaactttaaaaagacaagaccacttgttgaaatccagcgtgctctgtggctttcccctatttctcttaatacttagggaagaatctgacaggaagaagcgcacaggggtgtgcacaaagaaaatgacatgaatctttatttttcactgccagcttcaaggaaagaaaattttttctacaatttgcatgagggatttttttaattgtatgtactcatggttgtaaaccaaaacgtactgtaccgtacagagaaaaggagcaaaaaaccaagtcttctgtttatcctgaggctttccacaatgttcccctcctgtgagccaaggaggcaaactgcacaagcttgtaaatggttcgtctttaaaatgtacataagtggaacatttaataaaatgaggggaaatggatttataaacttgttttttttctaggtgaccctgtttaataggctttcacagactggggaatgctcaagatgtgatgggcctggtggtacaggtgtgacatttgttaccacccatttctcccaccccaccctgcttttttgtttgtttgttttttcatcccccagcacactataatatagtgaactggaaaagtcccttccagaaacagcttggccagctttgtgaacctttgacatctgaaaacaaccaaggatccatctgggcttctcttccccagctttttgcctgatgccattttattgacagacaatggactttgaagtcagcctttgcctttgagaaagttcaagaactatggttggtcacgtctatctacaacctaatcctactctttggtagtctctgcagcagccacagccttagcagagctggggttcctgtcttctgcacacgattgactttcttgatgggtaattttttttaagattataccaacagtggatcagctgggttttggccaggaagttgtctttgtggactctgcctgcatggcttagtagtagaaggaaatttttttttggttttgttttttataattcagtttaatcaataaacatgtatttattgactgtt

SEQ ID NO: 78 - DNA, 2207 bp, Homo sapiens
  misc_feature (1055)..(1055): n is a, c, g, or t
  misc_feature (1520)..(1520): n is a, c, g, or t
  misc_feature (1522)..(1523): n is a, c, g, or t
  misc_feature (1531)..(1538): n is a, c, g, or t
  misc_feature (1540)..(1546): n is a, c, g, or t
  misc_feature (1549)..(1555): n is a, c, g, or t
  misc_feature (1863)..(1863): n is a, c, g, or t
  misc_feature (2179)..(2179): n is a, c, g, or t
  misc_feature (2201)..(2201): n is a, c, g, or t
gggggccccagtcactgagccgccgccgaggattcagcagcctcccccttgagccccctcgcttcccgacgttccgttcccccctgcccgccttctcccgccaccgccgccgccgccttccgcaggccgtttccaccgaggaaaaggaatcgtatcgtatgtccgctatccagaacctccactctttcggtaagctatgggaaaggtcgcgggcccgggtggggcagcggggccttccgggcccggagacgtgttccgggaagttgccaagcgctccgggccttcgtaagctcgggcaggggaaacttgaccagggtcgcagggcagcgggatcaaggcctgggccccggggtcggaccctgagcgcgaccggaaggagcaggcggtaggtcagcccttgggcgggcccggcgtctcagtggcgcatttactaatggctcctgggcctcctcgggccacacccgcccctcccgtcaccattgcgtcacgtccgttacgtcaccacccgttgtcacggatccggagggaaaggcggtgccagccctaagtggcaagcgggtgcaccaatgggggtgggaggcttagccccgcctcgggagctcgggttccggcgggttgcatcagctgggtggggcaccgcctggcagcccggactcccccgacatgtgatcggcttcccagggagggcgggaggcccgggcgttccccgagcctggggaagctggccgtcccggactgacctgctcggggagagccagcaaaggacacattcggcctggcccaagccctgacgatttcagtgttgttttctgcacgcgcaaaacacctggggaccgaggggatggcagtggcatcctatctttgacagctctgaacgagcttaacctttttttcagacccctttgctgatgcaagtaagggtgatgacctgcttcctgctggcactgaggattatatccatataagaattcaacagagaaacggcaggaagacccttactactgtccaagggatcgctgatgattacgataaaaagaaactagtgaaggcgtttnaagaaagtaggtcttcagtgagattttgggaaggtcataatggatttgtccacaagggggtgccagctgtgttgtatgtattgttagcggaaggggtgataaatgcgttcatgctcttgctaggcctaattcgttttcctttgtgcttgcagaaagtttgcctgcaatggtactgtaattgagcatccggaatatggagaagtaattcagctacagggtgaccaacgcaagaacatatgccagttcctcgtagagattggactggctaaggacgatcagctgaaggttcatgggttttaagtgcttgtggctcactgaagcttaagtgaggatttccttgcaatgagtagaatttcccttctctcccttgtcacaggtttaaaaacctcacagcttgtataatgtaaccatttggggtccgcttttaacttggactagtgtaactccttcatgcaataaactganannagagccannnnnnnnannnnnnnaannnnnnncatttaaacagaggtcaagcaataggcgcctggcagtgtcaagcctgaaaccaagcaataccgtcatgtttcagccaagcccagagccctaagattacaaacaactatggccggaacctcctcagctctccctctgcagagttccctaccctaagagaatgttaccacctgaacagtcctcggtgaatctgagaggagaggatggggtaaggcagaagcaccagctgtactactagaagggagcttttggtggtagatcccctggtgtctccaacctgactaggtggacagagctcaaagaggccctncttaccgctagcgaggtgataggacatctggcttgccacaaaggtctgttcgaccagacatatcctagctaagggatgtccaaacatcagaatgtgaggccaaccttctatcagagttaaacttttgacaagggaacaaatctcaaactgatccatcagtcatgtagctagctgtagagcttgcaacttaatagcagcagctgcccaatgccatgtgaagtaacaaactggtttttggtttttttttccccttcagttttaatgttatgtgtaatgtatttaaacccttatttaaataaaacttgttttcagaaanaaaaaaaaaaaaaaaaaaaaanaaaaaa

SEQ ID NO: 79 - DNA, 7680 bp, Homo sapiens
gaagagcaagaggcaggctcagcaaatggttcagccccagtccccggtggctgtcagtcaaagcaagcccggttgttatgacaatggaaaacactatcagataaatcaacagtgggagcggacctacctaggtaatgtgttggtttgtacttgttatggaggaagccgaggttttaactgcgaaagtaaacctgaagctgaagagacttgctttgacaagtacactgggaacacttaccgagtgggtgacacttatgagcgtcctaaagactccatgatctgggactgtacctgcatcggggctgggcgagggagaataagctgtaccatcgcaaaccgctgccatgaagggggtcagtcctacaagattggtgacacctggaggagaccacatgagactggtggttacatgttagagtgtgtgtgtcttggtaatggaaaaggagaatggacctgcaagcccatagctgagaagtgttttgatcatgctgctgggacttcctatgtggtcggagaaacgtgggagaagccctaccaaggctggatgatggtagattgtacttgcctgggagaaggcagcggacgcatcacttgcacttctagaaatagatgcaacgatcaggacacaaggacatcctatagaattggagacacctggagcaagaaggataatcgaggaaacctgctccagtgcatctgcacaggcaacggccgaggagagtggaagtgtgagaggcacacctctgtgcagaccacatcgagcggatctggccccttcaccgatgttcgtgcagctgtttaccaaccgcagcctcacccccagcctcctccctatggccactgtgtcacagacagtggtgtggtctactctgtggggatgcagtggttgaagacacaaggaaataagcaaatgctttgcacgtgcctgggcaacggagtcagctgccaagagacagctgtaacccagacttacggtggcaacttaaatggagagccatgtgtcttaccattcacctacaatggcaggacgttctactcctgcaccacggaagggcgacaggacggacatctttggtgcagcacaacttcgaattatgagcaggaccagaaatactctttctgcacagaccacactgttttggttcagactcaaggaggaaattccaatggtgccttgtgccacttccccttcctatacaacaaccacaattacactgattgcacttctgagggcagaagagacaacatgaagtggtgtgggaccacacagaactatgatgccgaccagaagtttgggttctgccccatggctgcccacgaggaaatctgcacaaccaatgaaggggtcatgtaccgcattggagatcagtgggataagcagcatgacatgggtcacatgatgaggtgcacgtgtgttgggaatggtcgtggggaatggacatgcattgcctactcgcaacttcgagatcagtgcattgttgatgacatcacttacaatgtgaacgacacattccacaagcgtcatgaagaggggcacatgctgaactgtacatgcttcggtcagggtcggggcaggtggaagtgtgatcccgtcgaccaatgccaggattcagagactgggacgttttatcaaattggagattcatgggagaagtatgtgcatggtgtcagataccagtgctactgctatggccgtggcattggggagtggcattgccaacctttacagacctatccaagctcaagtggtcctgtcgaagtatttatcactgagactccgagtcagcccaactcccaccccatccagtggaatgcaccacagccatctcacatttccaagtacattctcaggtggagacctaaaaattctgtaggccgttggaaggaagctaccataccaggccacttaaactcctacaccatcaaaggcctgaagcctggtgtggtatacgagggccagctcatcagcatccagcagtacggccaccaagaagtgactcgctttgacttcaccaccaccagcaccagcacacctgtgaccagcaacaccgtgacaggagagacgactcccttttctcctcttgtggccacttctgaatctgtgaccgaaatcacagccagtagctttgtggtctcctgggtctcagcttccgacaccgtgtcgggattccgggtggaatatgagctgagtgaggagggagatgagccacagtacctggatcttccaagcacagccacttctgtgaacatccctgacctgcttcctggccgaaaatacattgtaaatgtctatcagatatctgaggatggggagcagagtttgatcctgtctacttcacaaacaacagcgcctgatgcccctcctgacccgactgtggaccaagttgatgacacctcaattgttgttcgctggagcagaccccaggctcccatcacagggtacagaatagtctattcgccatcagtagaaggtagcagcacagaactcaaccttcctgaaactgcaaactccgtcaccctcagtgacttgcaacctggtgttcagtataacatcactatctatgctgtggaagaaaatcaagaaagtacacctgttgtcattcaacaagaaaccactggcaccccacgctcagatacagtgccctctcccagggacctgcagtttgtggaagtgacagacgtgaaggtcaccatcatgtggacaccgcctgagagtgcagtgaccggctaccgtgtggatgtgatccccgtcaacctgcctggcgagcacgggcagaggctgcccatcagcaggaacacctttgcagaagtcaccgggctgtcccctggggtcacctattacttcaaagtctttgcagtgagccatgggagggagagcaagcctctgactgctcaacagacaaccaaactggatgctcccactaacctccagtttgtcaatgaaactgattctactgtcctggtgagatggactccacctcgggcccagataacaggataccgactgaccgtgggccttacccgaagaggccagcccaggcagtacaatgtgggtccctctgtctccaagtaccccctgaggaatctgcagcctgcatctgagtacaccgtatccctcgtggccataaagggcaaccaagagagccccaaagccactggagtctttaccacactgcagcctgggagctctattccaccttacaacaccgaggtgactgagaccaccatcgtgatcacatggacgcctgctccaagaattggttttaagctgggtgtacgaccaagccagggaggagaggcaccacgagaagtgacttcagactcaggaagcatcgttgtgtccggcttgactccaggagtagaatacgtctacaccatccaagtcctgagagatggacaggaaagagatgcgccaattgtaaacaaagtggtgacaccattgtctccaccaacaaacttgcatctggaggcaaaccctgacactggagtgctcacagtctcctgggagaggagcaccaccccagacattactggttatagaattaccacaacccctacaaacggccagcagggaaattctttggaagaagtggtccatgctgatcagagctcctgcacttttgataacctgagtcccggcctggagtacaatgtcagtgtttacactgtcaaggatgacaaggaaagtgtccctatctctgataccatcatcccagctgttcctcctcccactgacctgcgattcaccaacattggtccagacaccatgcgtgtcacctgggctccacccccatccattgatttaaccaacttcctggtgcgttactcacctgtgaaaaatgaggaagatgttgcagagttgtcaatttctccttcagacaatgcagtggtcttaacaaatctcctgcctggtacagaatatgtagtgagtgtctccagtgtctacgaacaacatgagagcacacctcttagaggaagacagaaaacaggtcttgattccccaactggcattgacttttctgatattactgccaactcttttactgtgcactggattgctcctcgagccaccatcactggctacaggatccgccatcatcccgagcacttcagtgggagacctcgagaagatcgggtgccccactctcggaattccatcaccctcaccaacctcactccaggcacagagtatgtggtcagcatcgttgctcttaatggcagagaggaaagtcccttattgattggccaacaatcaacagtttctgatgttccgagggacctggaagttgttgctgcgacccccaccagcctactgatcagctgggatgctcctgctgtcacagtgagatattacaggatcacttacggagaaacaggaggaaatagccctgtccaggagttcactgtgcctgggagcaagtctacagctaccatcagcggccttaaacctggagttgattataccatcactgtgtatgctgtcactggccgtggagacagccccgcaagcagcaagccaatttccattaattaccgaacagaaattgacaaaccatcccagatgcaagtgaccgatgttcaggacaacagcattagtgtcaagtggctgccttcaagttcccctgttactggttacagagtaaccaccactcccaaaaatggaccaggaccaacaaaaactaaaactgcaggtccagatcaaacagaaatgactattgaaggcttgcagcccacagtggagtatgtggttagtgtctatgctcagaatccaagcggagagagtcagcctctggttcagactgcagtaaccaacattgatcgccctaaaggactggcattcactgatgtggatgtcgattccatcaaaattgcttgggaaagcccacaggggcaagtttccaggtacagggtgacctactcgagccctgaggatggaatccatgagctattccctgcacctgatggtgaagaagacactgcagagctgcaaggcctcagaccgggttctgagtacacagtcagtgtggttgccttgcacgatgatatggagagccagcccctgattggaacccagtccacagctattcctgcaccaactgacctgaagttcactcaggtcacacccacaagcctgagcgcccagtggacaccacccaatgttcagctcactggatatcgagtgcgggtgacccccaaggagaagaccggaccaatgaaagaaatcaaccttgctcctgacagctcatccgtggttgtatcaggacttatggtggccaccaaatatgaagtgagtgtctatgctcttaaggacactttgacaagcagaccagctcagggtgttgtcaccactctggagaatgtcagcccaccaagaagggctcgtgtgacagatgctactgagaccaccatcaccattagctggagaaccaagactgagacgatcactggcttccaagttgatgccgttccagccaatggccagactccaatccagagaaccatcaagccagatgtcagaagctacaccatcacaggtttacaaccaggcactgactacaagatctacctgtacaccttgaatgacaatgctcggagctcccctgtggtcatcgacgcctccactgccattgatgcaccatccaacctgcgtttcctggccaccacacccaattccttgctggtatcatggcagccgccacgtgccaggattaccggctacatcatcaagtatgagaagcctgggtctcctcccagagaagtggtccctcggccccgccctggtgtcacagaggctactattactggcctggaaccgggaaccgaatatacaatttatgtcattgccctgaagaataatcagaagagcgagcccctgattggaaggaaaaagacagacgagcttccccaactggtaacccttccacaccccaatcttcatggaccagagatcttggatgttccttccacagttcaaaagacccctttcgtcacccaccctgggtatgacactggaaatggtattcagcttcctggcacttctggtcagcaacccagtgttgggcaacaaatgatctttgaggaacatggttttaggcggaccacaccgcccacaacggccacccccataaggcataggccaagaccatacccgccgaatgtaggacaagaagctctctctcagacaaccatctcatgggccccattccaggacacttctgagtacatcatttcatgtcatcctgttggcactgatgaagaacccttacagttcagggttcctggaacttctaccagtgccactctgacaggcctcaccagaggtgccacctacaacatcatagtggaggcactgaaagaccagcagaggcataaggttcgggaagaggttgttaccgtgggcaactctgtcaacgaaggcttgaaccaacctacggatgactcgtgctttgacccctacacagtttcccattatgccgttggagatgagtgggaacgaatgtctgaatcaggctttaaactgttgtgccagtgcttaggctttggaagtggtcatttcagatgtgattcatctagatggtgccatgacaatggtgtgaactacaagattggagagaagtgggaccgtcagggagaaaatggccagatgatgagctgcacatgtcttgggaacggaaaaggagaattcaagtgtgaccctcatgaggcaacgtgttacgatgatgggaagacataccacgtaggagaacagtggcagaaggaatatctcggtgccatttgctcctgcacatgctttggaggccagcggggctggcgctgtgacaactgccgcagacctgggggtgaacccagtcccgaaggcactactggccagtcctacaaccagtattctcagagataccatcagagaacaaacactaatgttaattgcccaattgagtgcttcatgcctttagatgtacaggctgacagagaagattcccgagagtaaatcatctttccaatccagaggaacaagcatgtctctctgccaagatccatctaaactggagtgatgttagcagacccagcttagagttcttctttctttcttaagccctttgctctggaggaagttctccagcttcagctcaactcacagcttctccaagcatcaccctgggagtttcctgagggttttctcataaatgagggctgcacattgcctgttctgcttcgaagtattcaataccgctcagtattttaaatgaagtgattctaagatttggtttgggatcaataggaaagcatatgcagccaaccaagatgcaaatgttttgaaatgatatgaccaaaattttaagtaggaaagtcacccaaacacttctgctttcacttaagtgtctggcccgcaatactgtaggaacaagcatgatcttgttactgtgatattttaaatatccacagtactcactttttccaaatgatcctagtaattgcctagaaatatctttctcttacctgttatttatcaatttttcccagtatttttatacggaaaaaattgtattgaaaacacttagtatgcagttgataagaggaatttggtataattatggtgggtgattattttttatactgtatgtgccaaagctttactactgtggaaagacaactgttttaataaaagatttacattccaca

SEQ ID NO: 80 - DNA, 4660 bp, Homo sapiens
  misc_feature (299)..(299): n is a, c, g, or t
  misc_feature (2031)..(2033): n is a, c, g, or t
  misc_feature (2035)..(2050): n is a, c, g, or t
  misc_feature (2068)..(2068): n is a, c, g, or t
  misc_feature (2107)..(2107): n is a, c, g, or t
  misc_feature (2328)..(2330): n is a, c, g, or t
  misc_feature (2696)..(2696): n is a, c, g, or t
  misc_feature (2837)..(2837): n is a, c, g, or t
  misc_feature (2927)..(2927): n is a, c, g, or t
  misc_feature (2998)..(2998): n is a, c, g, or t
  misc_feature (3074)..(3074): n is a, c, g, or t
  misc_feature (3076)..(3076): n is a, c, g, or t
  misc_feature (3842)..(3842): n is a, c, g, or t
  misc_feature (3957)..(3960): n is a, c, g, or t
  misc_feature (3979)..(3979): n is a, c, g, or t
  misc_feature (4029)..(4029): n is a, c, g, or t
  misc_feature (4169)..(4169): n is a, c, g, or t
  misc_feature (4289)..(4289): n is a, c, g, or t
  misc_feature (4643)..(4643): n is a, c, g, or t
  misc_feature (4646)..(4646): n is a, c, g, or t
  misc_feature (4659)..(4659): n is a, c, g, or t
cgcccagcctgcagagctcgcgccgcggcagcccagccgctcggccccgccgcgctcgcagaggccgccatgggcaccgcgcgctggctcgcgctgggcagcctcttcgccctggctgggctgctggaaggccggctcgtgggcgaggaggaagccggctttggcgaatgtgacaagttcttctacgccgggaccccgcctgcggggctggcggccgattcccacgtgaagatctgtcagcgcgcggagggtgctgagcgcttcgccaccctctacagcacccgggaccgcatccccgngtactccgcgttccgcgccccgcgccctgcgcccggcggcgccgagcagcgatggctggtggagccgcagatcgatgaccccaacagcaaccttgaggaggcgattaatgaggcagaggccatcacctctgtgaacagcctgggaagcaagcaagccttgaatacagattaccttgattctgattaccaaagaggacagctttacccattctcccttagcagtgatgtccaggtggccacatttactctcacaaattcagccccaatgactcagtccttccaggaacggtggtatgtgaatctccacagcctaatggaccgggctttgaccccacagtgtggcagtggggaagacctatatatcctcacaggcacagtgccctcagactacagagttaaagacaaagtggcagtccctgagtttgtttggctggcagcctgttgtgctgtccctggaggaggctgggccatgggctttgtcaagcacacccgggacagtgacatcatagaagatgtgatggtaaaagatcttcagaaactgcttccatttaaccctcagctgtttcagaacaactgtggtgaaactgagcaagacacagagaaaatgaaaaaaatcctggaagtggttaaccaaatccaggatgaagaacgaatggtacaatctcaaaagagttctagtcccctttctagcaccaggagcaagaggtctactctgttgcctccagaggcatctgagggaagtagtagctttttgggaaaactcatgggcttcattgctaccccattcatcaagctttttcaattaatttattaccttgtggtagcaatcctgaagaacattgtctatttcctgtggtgtgttaccaagcaggtgattaatggcatagaaagttgcctttaccgcctgggctcagccaccatctcatacttcatggccattggggaagagttggtgagcattccctggaaggtgctcaaggtcgtggccaaagtcatcagggctctcctccggatcctttgttgtctgctgaaggccatttgccgagttctgagcatccctgtccgtgtccttgtggatgtggccactttccctgtgtacaccatgggcgctattccaattgtttgcaaggacattgcactgggccttggtggcactgtctcactgctctttgacactgcttttggtaccctgggtggcctatttcaggtggtttttagtgtctgcaagcggattggctacaaggttacttttgacaattctggggagttataaactcaaaaaactaatagtatccagtcacagtgaatttgaaagctggaatagtttgtctttacaatgggtttctgttcactgtcagttatcattatattttggcctttggtggggatgtctgcttgtttttgcaaaagaagatggcagaatttagacttgacagaggagaaatgctcagggtgagattaggtgtagtaatctgctgtttacctccagttatatgtgcaaactcccaagccactaataacttcagttatgcactctaacacagacgaccacctgaaatgcactggtatttatttctgataattaaaaattacaggggagggaagaactagaaaaagaacaactttagaccaaaggtgtctgagaaaaggagaaagggagcttgttcttcccattgctctttgtgatttaaggcaaaacagattaaaaaaaaaatatgcagccaaaaaaaannnannnnnnnnnnnnnnnnctcaactcgactgacctnggtggaatgcagataatgcctctttgttgaaataacttngtgggaatgtacaattttctatatctcttagctttccgtggttctcaaggatatgtacagttttcattttcctccaaagttgaattttgctacatttttcttttaggtaatgataagcattttttaaaaaatcatttttaggtaatggtaagcattttatgccaaatgtggcataacagagtttgaattgaagggcaaagttttcttttcttttttttttnnnggccccttgaatggtataatacagtcctctccggtggaaagaagagaagagaaggtggacagccctgctcttagtaggtgctgcagatccaaggacatcttttgtccagcttggattaacttgacgtgtatccctgcctgacaaggttgaactgaaagatctatatgttaagctaacatgaaaattcatattctgcaacatagtagatttttctaatgcatgaaataagtacccagcacagtaaaaatactctgacttatgtccctaaatggttgttttgatacaactatatagaaaagagccacaaaataaagataaaagttattgtggccatctctgaaaaaaatatataaaatatttaagaanaattatatcttaggaaattatttttacagtgtgtttgaggctacaaacataactcccccattaatacaaattaaatgtgagagctcattctcaaaatttttttgatcaagcacttgtcattttaaatcttgcactaaaaantggtaacaagagggaccaaactttgcttcccacaattgggatggaatcacctggatttttctgaatgttttaaagaattgctgagaggtngaaacagccaagtatgaaatactgatcttggggctaccgcccaggatcaatcagaaagttatatgcaaaanttcggggtcccaacaaggagagaacaatatgtcaaccatttgcatggggtcgatggatgagaaacatgagcgtagnangagttacattttgcagaaaaatagcggaggcacacccagagtagaagagcagccagcaagctgccatcctgatcaatttgtgatgcaaggttagggagtatgagcaccgcatgggtccatgctagggagatgtgcaccaggcttagctaagaaacttaaagcagtattttaccaactcttgtcttagggagcataaagtttggatgtccctttatttcagcagtgtgaaggtaaatggaagggtgagggtttgacttggtactgattggtcaagaatcctgctggataaagaaaaggaattttagaagtgaccagagggacagtccagccaaactattatttgataaggaacccaaggccctgggaggcaacaggctagcccttagtttcatggctagctgagagcagattaggagccaacgttgtttgcacatgtcccatcacacctgagatgtcagacatgggaagttcgtgctattattcagttgcctctctggaccatggcaagatttcctcattcatcaaacagactccaggccctgacaaagcagttggatttggcatgtgtgatgaaaacaattagccatccatgtacaacattatgcttactgcatcccatggaaacttaattccctcctagcacatatttgcatactgaaaggtccgaaaagggcatccacggcagcttgagccccttagcaccatgtaaggagcacagcatccaaacggcttcttgagaaccattggggaatgtctttctttttcncatccaattgtttagtgtctatttattcttgggtggccagttttgaaacctaaaaagggacaataaagcaaaaagtatcagtaaggataggtggctgagacccactgccctgagnnnnctactagtgtggctgtgcntgtgggtctctagaaccatctgcattggacgtgaagccacagcaggtggntggactgctggcctgttcctaatgagctacgctgggctttgaggtagaggttggggtttatgaaccccaactctggcttaaagatcttgctgtggctctgttatgttctgaggccttgggattagcctcttcctcattanggagctgattttctagtctgtggatcagctatgcctttggacacttctcttttccattgtgccttttgaatgttgtcttctcactcagcatcagcacttcgatctaaatgcagactaggnagttgggaggaggaaccaaagtgaaccatccttcatttattcagtcattcgttcatctgtcaaacacgtatttggacatcaaggttgcagagatgaacaatgcatggatttcatctttgaggagttcaaaacctagtggagagaacacatggtacaatcgtaacacatgaaggacaagtaagtgctgcagtaaaggtactaataacatgttccttggaacagaggaagaaaaaccacgaaaccatggaaattagggaagcctttacagagggtgtgacaaaactcaatttgacattttcaagctatgtacaatgatgtgcaccttgcagatgctcaataaagtaattactgacnaanaaaaaaaaaaaana

SEQ ID NO: 81 - DNA, 2077 bp, Homo sapiens
  misc_feature (13)..(13): n is a, c, g, or t
  misc_feature (37)..(38): n is a, c, g, or t
  misc_feature (40)..(40): n is a, c, g, or t
  misc_feature (44)..(44): n is a, c, g, or t
  misc_feature (47)..(53): n is a, c, g, or t
  misc_feature (55)..(59): n is a, c, g, or t
  misc_feature (62)..(63): n is a, c, g, or t
  misc_feature (74)..(74): n is a, c, g, or t
  misc_feature (157)..(157): n is a, c, g, or t
  misc_feature (696)..(696): n is a, c, g, or t
  misc_feature (1160)..(1161): n is a, c, g, or t
  misc_feature (1405)..(1405): n is a, c, g, or t
  misc_feature (1420)..(1420): n is a, c, g, or t
  misc_feature (2007)..(2007): n is a, c, g, or t
  misc_feature (2009)..(2017): n is a, c, g, or t
  misc_feature (2019)..(2019): n is a, c, g, or t
gacccacgcgtcngcttctgatccccatggtttctgnngngaantcnnnnnnntnnnnnctnnagtcctatttngtaacggattatgatccaaccattgaagattcttacacaaagcagtgtgtgatagatgacagagcagcccggctagatatttnggatacagcaggacaagaagagtttggagccatgagagaacagtatatgaggactggcgaaggcttcctgttggtcttttcagtcacagatagaggcagttttgaagaaatctataagtttcaaagacagattctcagagtaaaggatcgtgatgagttcccaatgattttaattggtaataaagcagatctggatcatcaaagacaggtaacacaggaagaaggacaacagttagcacggcagcttaaggtaacatacatggaggcatcagcaaagattaggatgaatgtagatcaagctttccatgaacttgtccgggttatcaggaaatttcaagagcaggaatgtcctccttcaccagaaccaacacggaaagaaaaagacaagaaaggctgccattgtgtcattttctagaatcccttcagttttagctaccaacggccaggaaaagccctcatcttctctttctctcctcagtttacatcttgttggtacctttctagccttagacaaatgatcaccatgttagccttagacnaagaagctggctagtcctttctgtgaagctaatacaatggtcatttccagacaaatttaaaggaaacactaaggctgcttcaaagattatctgattcctttaaaatatatgtctatatacacagacatgctctttttttaagtgcttacattttaatagagatgaatcagttttggaatctaagctgtttgccaagctgaagctacaggttgtgaaataatttttaacttttggaatcatactgcctactgttactctaaatagaaatatagggttttttttaatgtgaatttttgcctatctttaaacatttcaatgtcagcctttgttaaccttaaatacactgaattgaatctacaaaagtgaaccatctcagacctttactgatactacaacttttgttttctgatggccaaaataccaaatgcctgttgtatttatggattaaaaactgcttataaaannctgtgttactactcctactcttggagatgataatattctatgtggtcaaatatttggactcatttaggacttagatatttcagtgtacttgattttttaatttaactctttttcacagccacgctaagggtaaaaaggaataatttccttctgtcttccttttcaagtatttctgggtaagggattcaaaaaactaaaactgtttttgtttgtaatataaaatatggaattgatctttccaggntcagagatgattaantgtttttgctatatacttttatacattattttcttatcaaactagttaacaagtatttttatatgtttgtaagcagatatgctttcatagcataccttgtgtatatgtaaagataagtatttaattctcactgttcacttttaactgacaaagaaaaacaagtggaaactacagaaactgtggtagaacttttacttgctggtctggtcttggttgtacccatctttggccagtcacataactactcaagaaaccttcccaatagagtacaacaggatgagactctgaaatcactttcagtattccctgctagatattgattgttatttcaagtattaagtgtaagcttttaatggataattagtataactgtggatggcatctgattttgtttttaattctgtggattgtgtttaagcaattcaatagtatgttcctgattttgagatgctaagtggtattgcacagttgtcactttatcaagtgtgtacaacagtcccatgaagtttatagagcatacccttgtatagcttcaggtgctagaattaaaattgatctgttatcacaaaaaaaaaaaaaaaaaaaanannnnnnnnngngcggccgctctagagtatccctcgaggggcccaagcttacgcgtacccagctttcttg

SEQ ID NO: 82 - DNA, 2077 bp, Homo sapiens; identical to SEQ ID NO: 81
  misc_feature (13)..(13): n is a, c, g, or t
  misc_feature (37)..(38): n is a, c, g, or t
  misc_feature (40)..(40): n is a, c, g, or t
  misc_feature (44)..(44): n is a, c, g, or t
  misc_feature (47)..(53): n is a, c, g, or t
  misc_feature (55)..(59): n is a, c, g, or t
  misc_feature (62)..(63): n is a, c, g, or t
  misc_feature (74)..(74): n is a, c, g, or t
  misc_feature (157)..(157): n is a, c, g, or t
  misc_feature (696)..(696): n is a, c, g, or t
  misc_feature (1160)..(1161): n is a, c, g, or t
  misc_feature (1405)..(1405): n is a, c, g, or t
  misc_feature (1420)..(1420): n is a, c, g, or t
  misc_feature (2007)..(2007): n is a, c, g, or t
  misc_feature (2009)..(2017): n is a, c, g, or t
  misc_feature (2019)..(2019): n is a, c, g, or t

SEQ ID NO: 83 - DNA, 4199 bp, Homo sapiens
ccaagatggcggcgatcggcggcgttgaggcgggatccgggcgagccgagtgaagacctggtcctgtagacgggaaggagcctggacacagtgacacattctcaaaggccctgcaggaccaccatggcttatgatgactccgtgaagaaagaagattgttttgatggtgatcatacctttgaggacataggacttgcagctggccgaagccaacgagagaaaaaacgttcttacaaagattttttaagggaagaggaagaaattgctgctcaggtcaggaattcttccaagaagaagttgaaggatagtgaactttacttcttggggacggacacacacaagaagaagaggaagcactcctctgatgattactactatggaggacagtggttcttgttctgagtgccgataaaccagtgtgaaggaggagagaggtggagggctggtattttggaggattcagcatagaagaacagtctgcatttgtgatacaccagatatttcgtctttggaatcgtcacagaagaaaaagaaaaagtccagcccacagtctactgatacagctatggacctgttgaaagctatcacttccccactggcagcaggctccaagccctccaaaaagactggggagaaatcctctggctcttcaagccattcggagagtaaaaaggagcaccacaggaagaaagtcagtggaagcagtggggaactacccctagaggatggtggctcccacaaatcgaaaaaaatgaaacctctctatgtgaacacagagacactgacccttcgggagcctgatggtttaaaaatgaaacttattctgtcaccaaaggagaagggaagcagctctgttgatgaggagtcttttcaatatccctcccaacaagcgactgtgaaaaaatcctcaaagaaatcagctcgggatgagcagggtgctttactcctaggacatgagttacagagctttctgaaaacagcccggaaaaagcacaagtcatcctcagacgcacattcatctcctggccctgaaggctgtgggtctgacgcctcccagttcgcagagtcccacagtgctaaccttgatctttcagggcttgaacctattctggtagaatcagactcatcctctggtggggaactagaggctggggagttagtgatagatgattcttaccgagaaatcaagaagaaaaagaagtcaaagaagagcaaaaagaagaaagacaaggagaagcataaagagaagcgacactccaagtccaagagaagtttaggactttctgccgtgccagtgggagaggtcacagtgacatctggccctcctcccagcatcccatacgctggagcagcagcacctcccctgccacttcctggcctccacacagatgggcatagtgaaaaaaaaaagaaaaaagaagagaaggacaaagagagagagagaggagaaaagccaaaaaagaagaacatgtcggcctaccaggtgttctgtaaagagtatcgcgtgaccattgtggctgaccatccaggtatagattttggggaacttagtaaaaaactggctgaggtgtggaagcaattaccagaaaaagacaaactgatttggaagcaaaaagctcagtatctgcagcacaaacagaacaaagcagaagccacaactgtgaaaaggaaagcatccagctcagaaggttccatgaaagtcaaagcctcttctgtaggagtactgtcaccccagaagaagtccccacccaccaccatgctgttaccagcctcaccagccaaagcccctgagacagagcccattgatgttgctgctcatcttcagctgttgggagagtccctaagcctcattggacaccgtctgcaggaaactgagggtatggtggctgtgtctggcagtttgtcagtgcttctggattccattatctgtgcccttggccccttggcatgtctcaccacacaactacctgaattgaatggctgtcccaaacaggtcttgtcaaacacattagacaacattgcttacatcatgccgggactgtgacagcaaagaatcctgggacagaaaccttatcctacaccattgctggtttgtgtatatatgactgttgcagattccttcagtggcctctggctgtaggttttaaatttttatatctatacatacatatatacatatatatataatgtacaatatatacatagactgtaactactttgcttttaataattttatgaaatggcaaaggtttagccaagaggaaattttggcatgaatacaggcttgggattcttttttctcctgtggtggataaatctgccttaaaaatcaatgtaacttgggggctgggggcttgttctgggtgccaagcgcatctctttatggacagctaaaatgtgattattttccaagctcagttggacctccagacccatcactgaccatttgccttacctgtcttagtctgaaatgtaataggaaagataacgggaagatgccagttgactgaaaattcaaagcctttcaatttgaagtgacctaggtgggaggtgataaaatttgttccctttatagttatggaagtggcttaggtgaattgagtagagggttcattccaattcctactgtataggtgtctgtgtctcaaaatttattgtaatcattggtaccattggtggcctcaacagaggccaaggagttctgtgagccctggcagcaaaaaacaccttggggggtgaagctgtcaatgccaccagttggacctccatacattctgagctaacccagaatctttagtcggcagaattaagtgctggtgtctttcactggcagcatgaagttagccaccaagtcctcacaagccgtgctgcttagttgctcggtggttatggataaactttgcccagcatgatttttgggttcatcttatcagttcccctggtgggcagatacacagtgttctgcattccacatgtaagtgaattgcaaaaacaaaacaaaactcactctcttgtaggtttatttatgtgtgtgtgaatgtgtattttaattatgtgtatttaactctttaaaatctcttagattttaatttatcctgtaaatttctgtatatataatttaataacagaagcctccaccagcaacagcatgtggaagatacagatttgtcatttctcccttccgccctcccttctttccttccttccttccctgtttccttccctctttccttccttcctcctggtctgttccaaaaactctgaatcatctacattttaaggtattttacctcaaaaatgaatcattgtgttaggattctaattctttataaagaacttcatgggcttcaataatgtctagaaagtaaaataaagaggaatgttaccatccccagctgcccttatttccagagaaccagacgtttgtttcccagttggaaagaagacagttgagcacttcaggatggtttttaaatttggtatgagattctctgccaacaccaagctctgagttaactgtgctttcttctcctggccctgacagagcactacagcatcaaagtaaatctttggggacagtgtagcccatctgcatcctatttaatttcttcccttctccccaccagtgttgtcacagggctatgttgcttaaaggtagtctggctgctgaatccctttctcagctcagagcagttttaagatttaattgggaatacagagaaacaggattgtttgagaaccaaaatcaagaggaacagaaatcttaacttgatttcatgtgttagaacattgtaccatgcctcttctgtatctgtggaagtttcctgtttgacacagggtatctaggaggggcggggaagacatggatagtataggaagacattaatcctagcattgtcatttatatacattaatgaaatcctgatgaggacctgctttttgtttgttttcctttgaaacccagccctattgtatttgtatttaaaatttgtacacatttgtataataatctgtaccttgtggtatttggtactattagaggaaaaactttggattcagaccttcttgcagtttttatatcattgttttattttgttttttaaataaattctagtggtttgatccaaatcccattacagttgtataaagaaataaaattttgtacttatattattaaaaatcacatttttaatatttgt

SEQ ID NO: 84 - DNA, 1589 bp, Homo sapiens
gggtactgccgtcgccgccgcccaggccggggaggggtgcgttagtgtcaggaagcgggctgcgccgaggtcgtagcggaaccagctggcgaccccgcagaatgaaccacaagagcaagaagcgcatccgcgaggccaagcggagtgcgcggccggagctcaaggactcgctggattggacccggcacaactactacgagagcttctcgctgagcccggcggccgtggcggataacgtggaaagggcagatgctttacagctgtctgtggaagaatttgtggagcggtatgaaagaccttacaagcccgtggttttgttgaatgcgcaagagggctggtctgcgcaggagaaatggactctggagcgcctaaaaaggaaatatcggaaccagaagttcaagtgtggtgaggataacgatggctactcagtgaagatgaagatgaaatactacatcgagtacatggagagcactcgagatgatagtcccctttacatctttgacagcggctatggtgaacaccctaaaagaaggaaacttttggaagactacaaggtgccaaagtttttcactgatgaccttttccagtatgctggggagaagcgcaggcccccttacaggtggtttgtgatggggccaccacgctccggaactgggattcacatcgaccctctgggaaccagtgcctggaatgccttagttcagggccacaagcgctggtgcctgtttcctaccagcactcccagggaactcatcaaagtgacccgagacgaaggagggaaccagcaagacgaagctattacctggtttaatgttatttatccccggacacagcttccaacctggccacctgaattcaaacccctggaaatcttacaaaaaccaggagagactgtctttgtaccaggaggctggtggcatgttgtcctcaatctcgacactactatcgccatcacccaaaattttgccagcagcaccaacttccctgtggtatggcacaagacggtaagagggagaccaaagttatcaaggaaatggtataggattttgaagcaagagcaccccgagttggcagtcctcgcagactcggttgaccttcaggagtccacagggatagcttccgacagctccagcgactcttccagctcctccagctccagttcgtcagactccgactcagagtgcgagtctggatccgagggcgatgggacagtgcaccgcaggaagaagaggaggacgtgcagcatggtgggaaacggggacaccacctcccaggacgactgtgtcagcaaagagcgcagctcctccaggtgacccagcaaggctgttgtctgtatggaaggacacgctcgcggcaagggcagggcctggggagggtggcctgtccagtcctgcagacaaggggaggcctgacagagcccaagaatgaggacaccctcggcacgggaacccattcacttagcgtttgctccagtagctttccctctgctaccaatgcagataaacgcggcttgttttactcaggcaagagaatgtgaatagtgccaagaaaatcctttacattatttaataaaaattgaatccattttc

SEQ ID NO: 85 - DNA, 2785 bp, Homo sapiens
  misc_feature (18)..(19): n is a, c, g, or t
  misc_feature (21)..(25): n is a, c, g, or t
  misc_feature (27)..(27): n is a, c, g, or t
  misc_feature (62)..(63): n is a, c, g, or t
  misc_feature (113)..(113): n is a, c, g, or t
  misc_feature (183)..(183): n is a, c, g, or t
  misc_feature (185)..(185): n is a, c, g, or t
  misc_feature (187)..(187): n is a, c, g, or t
  misc_feature (189)..(189): n is a, c, g, or t
  misc_feature (191)..(191): n is a, c, g, or t
  misc_feature (193)..(193): n is a, c, g, or t
  misc_feature (199)..(201): n is a, c, g, or t
  misc_feature (203)..(207): n is a, c, g, or t
  misc_feature (212)..(221): n is a, c, g, or t
  misc_feature (1165)..(1165): n is a, c, g, or t
  misc_feature (1294)..(1294): n is a, c, g, or t
  misc_feature (1306)..(1306): n is a, c, g, or t
  misc_feature (1325)..(1325): n is a, c, g, or t
  misc_feature (1822)..(1822): n is a, c, g, or t
  misc_feature (1986)..(1986): n is a, c, g, or t
  misc_feature (2026)..(2026): n is a, c, g, or t
  misc_feature (2178)..(2178): n is a, c, g, or t
  misc_feature (2186)..(2186): n is a, c, g, or t
  misc_feature (2763)..(2765): n is a, c, g, or t
aattggacttgggaggcnngnnnnngngtcaggcttaaaacttgttggaggggagtaaccannctgctcctctcgctctcctcctcgtctgcgccgcgtttcagaggttgccnatcagccttgtgatttatttttatatctgctttttataaagagagaaatatatatatatatatatatatntntntntntntttctnnntnnnnnaaaannnnnnnnnnaagagaaaataaggcaacatcaatgaaggagagaagagccagccagaaattatccagcaaatctatcatggatcctaatcagaacgtgaaatgcaagatagttgtggtgggagacagtcagtgtggaaaaactgcgctgctccatgtcttcgccaaggactgcttccccgagaattacgttcctacagtgtttgagaattacacggccagttttgaaatcgacacacaaagaatagagttgagcctgtgggacacttcgggttctccttactatgacaatgtccgccccctctcttaccctgattcggatgctgtgctgatttgctttgacatcagtagaccagagaccctggacagtgtcctcaaaaagtggaaaggtgaaatccaggaattttgtccaaataccaaaatgctcttggtcggctgcaagtctgatctgcggacagatgttagtacattagtagagctctccaatcacaggcagacgccagtgtcctatgaccagggggcaaatatggccaaacagattggagcagctacttatatcgaatgctcagctttacagtcggaaaatagcgtcagagacatttttcacgttgccaccttggcatgtgtaaataagacaaataaaaacgttaagcggaacaaatcacagagagccacaaagcggatttcacacatgcctagcagaccagaactctcggcagttgctacggacttacgaaaggacaaagcgaagagctgcactgtgatgtgaatctttcattatctttaatgaagacaaaggaatctagtgtaaaaaacaacagcaaacaaaaaggtgaagtctaaatgaagtgcacagccaaagtcatgtataccagaggcttaggaggcgtttgagaggatactcatctttttggaatcctgaccttaggttcggcatgtagaccaagtgatgagangtgaatacatggaagagtttttaagtgtgacttgaaaaatatgccaaaaaatgagagatacaaatgagctagaggaagatgaggggggatgcgagtacctccaagaagaaaaatcacactctgaatggngcttgcattttngggttttttttttttttgntataatctattcatggatctccactttgatttaatttttaaatgttttaatctcctttacaaaaagtatacgttaatataccgtcctcaagggggaactggcactgtgaccttagcatttagttttctagaggatgtgatctaatttctttctagctcatcattaaaaaggaaattgtatcaggacccatgggatatatccagaggcaaactttatgaggctttgaaatcttgccttcctgaagatagctgagtaggatggttctaaggaaagcctttgcaatcttgcaagatttgtagaccagcactacaaagatcgcatagatcaaataggaaaaaaaatgtcgatttttattcagtctgatggttctgttcttcattgtgattgtcattaaaaagtggtaaattgctcaatgtaatatttttgtgcgctgtttagaagttgtgtgattttttgccatcgttgataaaaatgcaaagtcaaataaaaggtgtctnggtttgatgtcatagaatgatccaaggagagaaaaaaggtagttactgttttcaccagaaaaggtaatgagtgaaggaaagaatagtagcagaaagcacagtttgtgagtaaagctgtctggaattaagttaccaaaaatacaaagcaaaaggactattatttngggttgaagctccaaaactgacagcatctgataatctgtnggtttatttcacttttcattaaatgaacattgatgagagaagatgccacttacccaagctttagagaatccctagtggaagattatatgataaactttcagtcctgacataacactagggcatttctagagtgtcattgctaaaacctcacngaacagancgcagccaaggtctgtgttcagcacttggtctctgttgttacgtaaaataataagcatttaaaatagtttacagatatttttgaccagttccttttagagattctttcagagaagaaaccagatctgacctgtttattgttggcgcttgttgaaaacgagctttctttcccatgatagtgcttcgtttttgaagtgttgaagctgtgctccccttaaatcgtggcaggagagattaaggtaattacaacactcagttctatgtcttacaagcactttgtcttgtctctgcaagaaaattcgattccagtcatttcccataaaatacagacattttaccaacataatatgctttgattgatgcagcattatgctttgggcagtattacaaaatagctggcgagtgctttctgtatttaaatattgtaaaaagaaaataagttataactgttataaagcagaacttttgttgcattttttaaactgttgaagtcactgtgtatgtttgtttggtcaatgtttccgcagtatttattaaaacatacttttttttttcttcaaataaaaaagtaaccatgnnnttgtctaaaaaaaaaaaaaa

SEQ ID NO: 86 - DNA, 3151 bp, Homo sapiens
aaaaaaaaaagacaaaccgttatgactgaaaagagcaccttccaaagtgtcgtttctgaatctccccaggaggatagtgcaggggacacatcaggggcagaaatgacatcgggtgttagcagatcctttaggcacattcgactaggtcctacagaaacggaaacctctgaacacattgccatccgtggacccgtgtccagaacatttgtgcttgctggttcagcggactcccctgagctaggcaagttagcagacagcagcagaacgctaaggcacattgcaccagggcccaaagaaacttcgtttacctttcagatggatgtgagtaacgtagaggcgatccgcagccggacacaggaagcgggagctctcggtgtgtctgaccgtggttcctggagagacgcggacagtaggaatgaccaggcagttggtgtgagctttaaggcctctgctggggaaggagaccaggcccacagagaacagggcaaggagcaggccatgtttgataagaaggtgcagctccagagaatggtagaccaaaggtcggtgatttcagatgaaaagaaagttgccctcctctatctagacaatgaggaggaggagaatgatgggcatttgttttaataagcagaaacattttgttttaatggcagcctgttggcgacgtgccaacatccaaaggccttaacttattttaagaggccgagggagtctatgaaaatctccccttttttacttttttaaagagtactcccggcatggtcaatttcctttatagttaatccgtaaaggtttccagttaattcatgccttaaaaggcactgcaattttatttttgagttgggacttttacaaaacacttttttccctggagtcttctctccacttctggagatgaatttctatgttttgcacctggtcacagacatggcttgcatctgtttgaaactacaattaattatagatgtcaaaacattaaccagattaaagtaatatatttaagagtaaattttgcttgcatgtgctaatatgaaataacagactaacattttaggggaaaaataaatacaatttagactctaaaaagtcttttcaaaaagaaatgggaaataggcagactgtttatgttaaaaaaattcttgctaaatgatttcatctttaggaaaaaattacttgccatatagagctaaattcatcttaagacttgaatgaattgctttctatgtacagaactttaaacaatatagtatttatggcgaggacagctgtagtctgttgtgatatttcacattctatttgcacaggttccctggcactggtagggtagatgattattgggaatcgcttacagtaccatttcattttttggcactaggtcattaagtagcacacagtctgaatgcccttttctggagtggccagttcctatcagactgtgcagacttgcgcttctctgcaccttatcccttagcacccaaacatttaatttcactggtgggaggtagaccttgaagacaatgaagagaatgccgatactcagactgcagctggaccggcaagctggctgtgtacaggaaaattggaagcacacagtggactgtgcctcttaaagatgcctttcccaaccctccattcatgggatgcaggtctttctgagtcaagggtgaaagatgaatacaataacaaccatgaacccacctcacggaagctttttttgcactttgaacagaagtcattgcagttggggtgttttgtccagggaaacagtttattaaatagaaggatgttttggggaaggaactggatatctctcctgcagcccagcaccgagatacccaggacgggcctggggggcgagaaaggcccccatgctcatgggccgcggagtgtggacctgtagataggcaccaccgagtttaagatactgggatgagcatgcttcattggattcattttattttacacgtcagtattgttttaaagtttctgtctgtaaggtgtagcatcatatataaaaagagtttcgctagcagcgcattttttttagttcaggctagcttctttcacataatgctgtctcagctgtatttccagtaacacagcatcatcgcactgactgtggcgcactggggaataacagtctgagctagcaccaccctcagccaggctacaacgacagcactggagggtcttccctctcagattcacctggaggccctcagacccgcagggtgcacgtctccccaggtcctgggagtggctaccgcaggtagtttctggagagcacgttttcttcattgataagtggaggagaaatgcagcacagctttcaagatactattttaaaaacaccatgaatcagatagggaaagaaagttgattggaatggcaagtttaaacctttgttgtccatctgccaaatgaactagtgattgtcagactggtatggaggtgactgctttgtaaggttttgtcgtttctaatacagacagagatgtgctgattttgttttagctgtaacaggtaatggtttttggatagatgattgactggtgatgaatttggtcaaggtgacagcctcctgtctgatgacaggacagactggtggtgaggagtctaagtgggctcagtttgatgtcagtgtctgggctcatgacttgtaaatggaagctgatgtgaacaggtaattaatattatgacccacttctatttactttgggaaatatcttggatcttaattatcatctgcaagtttcaagaagtattctgccaaaagtatttacaagtatggactcatgagctattgttggttgctaaatgtgaatcacgcgggagtgagtgtgcccttcacactgtgacattgtgacattgtgacaagctccatgtcctttaaaatcagtcactctgcacacaagagaaatcaacttcgtggttggatggggccggaacacaaccagtctttttgtatttattgttactgagacaaaacagtactcactgagtgtttttcagtttcctactggtggttttgatattgtttgtttaagatgtatatttagaatgacatcatctaagaagctgattttgctaaactcctgttccctacaatgggaaatgtcacaagaatgtgcaaaaacaaaaaaaaaaaaaa

SEQ ID NO: 87 - DNA, 1674 bp, Homo sapiens
  misc_feature (3)..(5): n is a, c, g, or t
  misc_feature (62)..(62): n is a, c, g, or t
  misc_feature (621)..(621): n is a, c, g, or t
  misc_feature (645)..(645): n is a, c, g, or t
  misc_feature (747)..(747): n is a, c, g, or t
  misc_feature (852)..(852): n is a, c, g, or t
  misc_feature (981)..(981): n is a, c, g, or t
  misc_feature (1093)..(1093): n is a, c, g, or t
ggnnnaaggggagcatggaaaaggccggctcccctgtctttccttggctgtcagagtcaggntaacacacaccaagagtggagtgcggccagcaagtttgagacctgcccgccctcctcgcagctctgctctgtgtcctcaggaagtcacagagtctactgaggcaaggagagggtgattctttccccaaatcccttcttccctggttcccaaaccaaagacagcctgcagccctttctgcatggggtgctctgttgacaggcttcccagatccctgagtctctctttccttcctcctcgatctttagttgtccacggtcaattcagtgcttccattgggggacagtcccctccgggatgacctgattcacctccagcccagggaatggaatctagaggaatacgtggggtgggtctggacaaggagcggcaggaatcaccacccatctccagctgtggagccctgtggaggggaaggggaagcttggggttcagagggaactcttccaggagaggggtgcccagtggaggtaaagatgatagagggttgtggggggtctctagttgaatgttttggcccatgactttggaacatggctggcagcttccagcagaagtcangctccccatcccccaggggacatnggacctttttcctgcttcctggtcactttcaaagaactatttgcgcaatctgtgggtctgtggattcacggggctttctgtgtgggtgctgcagttgctttngtctgcagcagcaggacacatctttcctcttactcagccctttatggcccatggggaactccgtggctcagggagagctgaactccaggggtgtgacctgggacnggtgggcctgaggtgcccagctcagggcagccaggtggctcatgggctgtagtgagccagctccctgggggaaaaggctgtgggccgttaggaccatcctccaggacaggtgacctctatgaggtcacntacggctgtggccgtgcaggcctccttccagcccagagtggcccagtagagcaaggcagacagtgacctccacccccgcagccctcttaaaaggccagtactcttgggggtngggggagggtttagaaagcatttgcccatctgcctttctttcccccagcccccacccgctttgaatgtagagacccgtgggcacttttccttttgtggtggggggtgcggaggaggtacccccacccctggcacagccgcctggaatgcaggactgtcactgctgttcgggtgatgacctcgttgccaagctcctcctgtccccttgttctgggggcaggcgctgtgcttctgtgaggtggtttagcttttgctttcgaagtggccagctgcggccaccaggtctcagcacaagagcgcttcctttgcacagaatgagcttcgagctttgttcagactaaatgaatgtatctgggaggggtcgggggcacgagttgattccaagcacatgcctttgctgagtgtgtgtgtgctgggagagtcagagtggatgtagagcgcggttttatttttgtactgacattggtaagagactgtatagcatctatttatttagatgatttatctggtaaatgaggcaaaaaaattattaaaaatacattaaagatgatttaaaaaaaaaaaaaaaaaaaaaaaaaaaaa

SEQ ID NO: 88 - DNA, 627 bp, Homo sapiens
  misc_feature (519)..(519): n is a, c, g, or t
  misc_feature (571)..(571): n is a, c, g, or t
  misc_feature (576)..(576): n is a, c, g, or t
caggcccgagctactcaggagagagggtctgtcgcttttaaaacgcattaaaggctctctcctggccttatttaacttgcctaagctaggtggagcacggctgagctcaggtaagctagcagctttccagcagaaggtgttctcccgaagaacgcagacctggggaagggttgactttttgggggcccctgctgagaacagttcaagagctccctaactgtagaggctgctggaggggcgaggggcagaaccccgggctgaatcatctcccgctttcccgggactttgctttcactttcctcagtcttgtggacagagtcaagtagattttcaaaagtgctccagaaaggccggaatagtcatgtagtggatgaaaagggcagtcacaaaactgcttaagaccagctgtcttgccagtaattgcagtgctttaagatttaattagtcacggctgctacgtgtatctgatgtagttaaccatggcctgtcatgattatattgctataaggaagggaacanaatctttatagtgtccaaagataattaattcttgtttaaatctttgccgcanagcanatatccgactgactggctcttagtctgtgactttgctctccgtgcacatta

SEQ ID NO: 89 - DNA, 1465 bp, Homo sapiens
tgggccctttgaccctgcacaatgacctttgcatcagccaaactcattgccatgacaactctttgtactgtgtccgtgccacagatctgttggtcacattgttaatagtaaaggggacaagttggagacggtcaatttttacattttttgttgcaattttttcttcaatggttgtaagtagttttttttttttttaataataaaggggttcactagttaatactctagaaatatctgtgtgttgcaattcaaatgtatgttgagattgtgaaaagcgcttcagtgccactagcttaccggtacactagactaagcccttgatgacttattgcatgatacagtaccaggaacaacaggtggcctaaatacatgaaaagcagtgtaagctagtgacactaaagccagtcttgtattactgtatttttgacagaatggttttgaaaactgtgctacagggactgatgtggcaaatatatctctttatgcagaaggaagtctttttttttctttttttttttttttaagaagtatggctttttatgcatccttcatcgagggcattggagttgcatggactgataaaagttgatgcaaaacaagaaagaaacaaacaaaaaaaaaaaaaccagcaaaatgtttaccaaaaaactcaaacaaatgagcagtgcctgttcaatttcacagtctctgttgagttcagttgtaaatatgtttcaaatgacattttcttgggaaaaaaaatctctacaacattgtagaatgtgaggggtaactacatcccaggcataggtttctcaaagctgcagtagattatgtcttcatcaagctgttaatttgtgcttatatcatatagaacttttagcatcctgggaagagctgcccccacctcaatgatatttctctgagaacaacttttgtaggactgtgtgtttctttagatacatttagtacaactgtaggtgacgagtagtcagttattgcttgctagctacacaccagggttgatccattttaaaacttttggcattttgtcctcatgggccataaatacagaaccttgtattttaattaaatttttttacaaaaggaggcacatgcacaatctccatgtaacaaacctttagcagtaggatgtattatacgacagttacttaatttctagagttcaggcctctgggatcaaccccagactgggccagaatgttagtgaaggttttattgtgcccggttggaggataacgttctttgggtactttttgtgggttgcaaatgaactcaattgccacaagttttaaactggtgtaaatcaagcttgacttaatgtgattgttactgttatatccagcctatactgctagcagctgctcatactgcagtcaattactggaagcggatatatttcctatgcaaaaactgtttaaacaataaaatgagctatgctacagaaaaaaaaaaaaaaaaaaaa

SEQ ID NO: 90 - DNA, 1728 bp, Homo sapiens
  misc_feature (51)..(51): n is a, c, g, or t
  misc_feature (59)..(59): n is a, c, g, or t
  misc_feature (72)..(72): n is a, c, g, or t
  misc_feature (76)..(76): n is a, c, g, or t
  misc_feature (84)..(84): n is a, c, g, or t
  misc_feature (94)..(94): n is a, c, g, or t
  misc_feature (375)..(375): n is a, c, g, or t
  misc_feature (720)..(720): n is a, c, g, or t
  misc_feature (729)..(729): n is a, c, g, or t
  misc_feature (731)..(732): n is a, c, g, or t
  misc_feature (1184)..(1186): n is a, c, g, or t
  misc_feature (1188)..(1188): n is a, c, g, or t
ataaatgaatttccaaaatgttaataaatggggacctgtaggttgtttttnctacatcnttcattatttggnaccntaaaaccnagtttttaantaagaaagtttatctttactctttctgaaattatgactccagaaaaagaaaaaaaaaatacaagtcatggaatcagcaatctggtaagaaatgctgccaagaatgtggcagtagctgtcctgacagactccaactgtctttactatctgaagaatcctaggctccacatgagaggcagaaatggatcagtcttattcttttctagaaatggttatctgtagtttggtagcaaaaaaaaagaaaaaagaatccataattagcagatttcttattaactattnggatctaattgaaatggctttattcttaggattaagaaagatagatgtggatacccagccactcgttccatattggtatctttttaaatcagctctgcctcttaatcaagaacctaaatattccctctttctaatctttgttccttctccctacaccctcatcctctttcactcttccttcataattcctctaagaaaaatatctttgcatcagcagtaatatcttttagaatagcactatcagaatttagcagtaaaccaacatacaggcttcagatttacttctgagtccaaaacaatttgtgctatccagggtagttaactctgggttaaacaagtacaggntatagattncnncttcaggtctacacaggaatttttaccatagggaaaagtggggagagctcaaacgtagttaataaggaaggtaatttgtttttcttttacctaaaagaaaagaaaattccttctgtgactacaggtctctgagaaattatctttcaaaagagatttcattgctcataagagtgttgtggcctattgataaaaacaattttgttcagtttcttgtcttgaaaaaaaagtggccttagctttttgcaatacttgaataaagtgtgtactcgcaaaagaatttctgtagcacagcattagagactcataacttttctgcaagaaatacaaacttacatcttccttttactaccttaagaatactagtgaataaaacattaattcaaagagcaaattatagaaactacaatgacatttaatgcaaattgtaggaatttacatgtttacaaatcatnnntntcaactggttgtgcagcaattcaataaaatatctttgtattataaaaatgtgaagaaaaaatgtaaactgatgtaaaggaggtactgtcattttaattaacctatgtttaatagcttttccttctggactttgcaaagccttcttggcaaacacattgcaaagcattctctgggaggttcagcctccttgtgtgtactgtactgtgcagacatgaaaaaataaacccgtttactgtgtgcgtgtaaatagcctggtcatcaggccattttcagccaatagtcacatccagtgcaattttgcaccgaacacttaagggtgtggtttgtaagtacgatctgtaaaataactgggatgaattcccatgtatacctgtgtaaatagatttgttaactgaaatatactttaagaaagataaaatctgtaaataaactgatttataaattaaaaaaaaaaaaaaaaaaaaaaaaaaaaaaaaaaaaaaaaaaaaaaaaaaaaaaaaaaaaaaaaaaaaaaaaaaaaaaaaaaaaaaaaaaaaaaaa

SEQ ID NO: 91 - DNA, 2997 bp, Homo sapiens
  misc_feature (176)..(176): n is a, c, g, or t
  misc_feature (215)..(215): n is a, c, g, or t
  misc_feature (257)..(257): n is a, c, g, or t
  misc_feature (598)..(598): n is a, c, g, or t
  misc_feature (601)..(601): n is a, c, g, or t
  misc_feature (608)..(608): n is a, c, g, or t
  misc_feature (708)..(708): n is a, c, g, or t
  misc_feature (750)..(752): n is a, c, g, or t
  misc_feature (764)..(764): n is a, c, g, or t
  misc_feature (776)..(776): n is a, c, g, or t
  misc_feature (804)..(804): n is a, c, g, or t
  misc_feature (823)..(823): n is a, c, g, or t
  misc_feature (1146)..(1146): n is a, c, g, or t
  misc_feature (1148)..(1151): n is a, c, g, or t
  misc_feature (1619)..(1622): n is a, c, g, or t
  misc_feature (1624)..(1626): n is a, c, g, or t
  misc_feature (1629)..(1630): n is a, c, g, or t
  misc_feature (1633)..(1633): n is a, c, g, or t
  misc_feature (1871)..(1871): n is a, c, g, or t
  misc_feature (1915)..(1915): n is a, c, g, or t
  misc_feature (1924)..(1924): n is a, c, g, or t
  misc_feature (1993)..(1993): n is a, c, g, or t
  misc_feature (2038)..(2038): n is a, c, g, or t
  misc_feature (2252)..(2252): n is a, c, g, or t
  misc_feature (2559)..(2559): n is a, c, g, or t
  misc_feature (2616)..(2616): n is a, c, g, or t
  misc_feature (2631)..(2631): n is a, c, g, or t
  misc_feature (2757)..(2757): n is a, c, g, or t
  misc_feature (2884)..(2884): n is a, c, g, or t
  misc_feature (2886)..(2889): n is a, c, g, or t
  misc_feature (2926)..(2926): n is a, c, g, or t
  misc_feature (2939)..(2939): n is a, c, g, or t
  misc_feature (2942)..(2942): n is a, c, g, or t
  misc_feature (2944)..(2945): n is a, c, g, or t
  misc_feature (2948)..(2949): n is a, c, g, or t
  misc_feature (2951)..(2952): n is a, c, g, or t
  misc_feature (2955)..(2959): n is a, c, g, or t
  misc_feature (2962)..(2963): n is a, c, g, or t
tgcgggccggcgacatggatcccctgttccagcaaaacgcacaagcaggtccacgagatccagtcttgcatgggacgcctggagacggcagacaagcagtctgtgcacatagtagaaaacgaaatccaagcaagcatagaccagatattcagccgtctagaacgtctggagatttngtccagcaaggagccccctaacaaaaggcaaaatgccanacttcgggttgaccagttaaagtatgatgtccagcacctgcnagactgcgctcagaaacttccagcatcggcgccatgcaagggagcagcaggagagacagcgagaagagcttctgtctcgaaccttcaccactaacgggactcagaagaagatccttgacattgccaacatgctgggcttgtccaacacagtgatgcggctcatcgagaagcgggctttccaggacaagtactttatgataggtgggatgctgctgacctgtgtggtcatgttcctcgtggtgcagtacctgacatgagccagccacgctcagtggctgaacagcattcccacagcctgcaagtgtgtgtgtgtgtgaaagagagaggggggcccagaggcngcnttttganatgtttgcctgtctgaactgtgaagacacttgggagtgattgtggtctaatttccaacctgctctgttttctgtgacatcttggagggggagctagtgcnaccaccatgcgcggtgcttaggaaatgaaagaagtcccgggnnntgtctctctcanctctcgctctcnactgggggagggaaagaatggctttggnggctttgttcacacagctngatgcgtgccctgggaaggtgtccacagtgagccctgtgtgcaggactgtccacacggttcacaccttgtcaccatcaggcctttctggctcctgatagggtggagcaaaagtggaaaggaaaggaaagaggccttttctcacagccattatattaaatagtaggtcgattcacatcctcgtgctcctggccaccctcccctgtgcctcagtgacatgtagatgactgactgccaatacttgtcaccattccctggaagcagctacctaggggaaacaagatgtagtgctattgccgataacaagtaagattttccacactanannnnggtgtttctcttttctaaagtgaggccagtgttatttcccgggagtgttcagtcttgaccctagtcactgattttttctagttgttaatagagtggttggcttttaaggttcagagactgtggcttggcacctgcgcccaggctttgtgggcctttgccccttagaaagtagctgtaggcaaagatttgtgattttccaattacagtctcagctctagttttagtatctctaattctttggttcccttctcttccctgaaatatattagcacctgccagccaggccctcattttgcccagccagtgtgggcagatcccaccgtggagacatctgtagtgtgtatgtccttgtaacactctgttttcagggactacaacctttttccttctgtgaccagccccggattcaggctgtactaataccaggtatattgtggaatttagtataaaggccaatctgtcctgaannnnannnaanntgntgaatcactgaaagtctcagaaagacctggttagtgtatgttctcatttaccacaggcctaccagccctgggcacagcagcttcatggcaagacataaaatgacactcaaaatccttcagatctggaaaccggctcagtattaaccctacctttggttgtcctgccctacctgctctgttagtttcttgttgcttgaactgtcttctgtcttatttcccttcctttctgtgttcctcntcacctctcttgttcccctccccgctgctctgtagtcatgttgntcctttcangcacctctgtggcatagctcccctttggtaagttttcttaattgtcatagattaactgagtttcctggnatgctaatttcacactttcggttggaggagatctccattgttccnacccctccgggccaaatgggccccaggtttccaaggaaggagcaatctgtgactcctaaaatgggttggggccctgccagagttaaagcagtgactggagggtggactggggggttgcagcatctttagacctagatctgtctaactctggggaggcacattgacatttccattacacacagcactgctgcggtgccagggacctagcgcaggncttttggtaatccataaaatggattctgagactgcgacggcaaggctgtcctgtcccccaggcacccaaggatcctgccagacagcacactttggaggaaggtctgcagggagcagctgagccatttgttcttgaactctgggaggcagaagtccccgcacccatcatgcgtggactgataggacatcttttcgtggtgtgcaccagtgctttccacacttgacagtggttggctttgatgaaccctcatgctgcaccttcagagccagtcctctagtttggaataaaaattgcagaggtggttttngggtctttaccacctgcggctggtggacagcagccagtgtgtctggacacccagggncattgagactgcatnttgtcacatgaccacttctcttcacacatctgctttcagtgcctggtgaaaaatagaccttggcctaacagtgtgactctctccaccgcctcagtgtagggaagggtccaggccagggaaggagcnccctctagtggaggcgggggtgaattcttaggtcgagctgatgcaagaaactccggtagccagcctctgtgaccttgtacatgagtttggtgtgcctattgtgatttaaaacaggtgggttatcaanannnncttgagatctctttattacatggacatttacttcagnggggaccactgtnagnanngcnnanntcnnnnnccnngtagttagaggagtcttgatttttagacttcact

SEQ ID NO: 92 - DNA, 2586 bp, Homo sapiens
ggcggaaaagccgccggtgctctgacggcctcgttcccctagcagttgcgggggagtttcctgccggcgcggctggagtctctgattctcagggttcggtggttggaagatgctccagagagacgaggctgcggcggaggaggtggcggcggccgaatcggcaacggcgctagggtggagagaaggcggcagcggcggcggcggcggcgtgaggggccgggcggtgtaaacagccccggaggcggcggaggcggcggtcgagaccccgagggggaagcggcggctgagtcagggtcgcgcctccgttggaaacttgggctgagtaccgcggcgggcgcgagcgaggcgccctagacatcttctccctcccttgcctcagacttattgcaaaacatgggtgcatttttggataaacccaaaactgaaaaacataatgctcatggtgctgggaatggtttacgttatggcctgagcagcatgcaaggatggagagtggaaatggaagatgcacacacagctgttgtaggtattcctcacggcttggaagactggtcattttttgcagtttatgatggtcatgctggatcccgagtggcaaattactgctcaacacatttattagaacacatcactactaacgaagactttagggcagctggaaaatcaggatctgctcttgagctttcagtggaaaatgttaagaatggtatcagaactggatttttgaaaattgatgaatacatgcgtaacttttcagacctcagaaacgggatggacaggagtggttcaactgcagtgggagttatgatttcacctaagcatatctactttatcaactgtggtgattcacgtgctgttctgtataggaatggacaagtctgcttttctacccaggatcacaaaccttgcaatccaagggaaaaggagcgaatccaaaatgcaggaggcagcgtgatgatacaacgtgttaatggttcattagcagtatctcgtgctctgggggactatgattacaagtgtgttgatggcaagggcccaacagaacaacttgtttctccagagcctgaggtttatgaaattttaagagcagaagaggatgaatttatcatcttggcttgtgatgggatctgggatgttatgagtaatgaggagctctgtgaatatgttaaatctaggcttgaggtatctgatgacctggaaaatgtgtgcaattgggtagtggacacttgtttacacaagggaagtcgagataacatgagtattgtactagtttgcttttcaaatgctcccaaggtctcagatgaagcggtgaaaaaagattcagagttggataagcacttggaatcacgggttgaagagattatggagaagtctggcgaggaaggaatgcctgatcttgcccatgtcatgcgcatcttgtctgcagaaaatatcccaaatttgcctcctgggggaggtcttgctggcaagcgtaatgttattgaagctgtttatagtagactgaatccacatagagaaagtgatggggcctccgatgaagcagaggaaagtggatcacagggaaaattggtggaagctctcaggcaaatgagaattaatcataggggaaactaccgacaacttctggaggagatgctgactagttacaggctagctaaagtagagggagaagaaagccctgctgaaccagctgccacagctacttcttcgaacagtgatgctggaaacccagtgacaatgcaggaaagccatactgaatcagaaagtggtcttgctgaattagacagctctaatgaagatgcagggacaaagatgagtggtgaaaaaatatgactttcctttttggtaatatttttgtgatctttgatggtttttaacctaggaagtgtaatgtatgcatttatataactgttttgttatttgaatcttggaaaactagttttattatattcagatagccttgttttttaaaaaggcctttgcatacacctttatgagatagtgtaaaattgactatttatagtactatggatttaatgaaattatatgtcatttcacattgtatgccagaaattaggctaccaattatgaattaaagtcagtagttaaattaatactagatagaattagaaattttgattagagagattatgctatattatggaaaaacttgttaatgtagaattatactgcttcatattattttacctattagtacactcatagttagctttgtaataaatttatgttttctttaataattttagttcttcaaagaatggctgatgctggcctgtaatttttctttcaaggatgataatttgtgtgttgtttgatttgtttatattttacatctctgtagttttatttttagaagttgtgagatattggatgtgtggctatttttcctttctctgtattctttatgaaacataacttttgaaaaacctatgtattattcatacagctttggtttgtatattctgtatagcctaactacacacatcaaaatgtatgtcaaccaagtgtttagaatgaaattataagtgtttaagtccaaataaagcatgtgatgtggaataatct

SEQ ID NO: 93 - DNA, 3027 bp, Homo sapiens
  misc_feature (308)..(308): n is a, c, g, or t
  misc_feature (909)..(909): n is a, c, g, or t
  misc_feature (1058)..(1058): n is a, c, g, or t
  misc_feature (1818)..(1818): n is a, c, g, or t
  misc_feature (2024)..(2024): n is a, c, g, or t
  misc_feature (2101)..(2103): n is a, c, g, or t
  misc_feature (2281)..(2282): n is a, c, g, or t
  misc_feature (2335)..(2335): n is a, c, g, or t
  misc_feature (2337)..(2338): n is a, c, g, or t
  misc_feature (2340)..(2340): n is a, c, g, or t
gaagcaaaaaggtcagcaactgtaatctgtatcgccttggaaaaaagaagggactacccagccgcatggtggtgtcaatatttgatccccctgtgaattggcttcctcctggttatgtagtaaatcaagacaaaagcaacacagataaatgggaaaaagatgaaatgacaaaagactgcatgctggcgaatggcaaactggatgaggattacgaggaggaggatgaggaggaggagagcctgatgtggagggctccgaaggaagaggctgactatgaagatgatttcctggagtatgatcaggaacanatcagatttatagataatatgttaatggggtcaggagcttttgtaaagaaaatctctctttctcctttttcaaccactgattctgcatatgaatggaaaatgcccaaaaaatcctccttaggtagtatgccattttcatcagattttgaggattttgactacagctcttgggatgcaatgtgctatctggatcctagcaaagctgttgaagaagatgactttgtggtggggttctggaatccatcagaagaaaactgtggtgttgacacgggaaagcagtccatttcttacgacttgcacactgagcagtgtattgctgacaaaagcatagcggactgtgtggaagccctgctgggctgctatttaaccagctgtggggagagggctgctcagcttttcctctgttcactggggctgaaggtgctcccggtaattaaaaggactgatcgggaaaaggccctgtgccctactcgggagaatttcaacagccaacaaaagaacctttcagtgagctgtgctgctgcttctgtggccagttcacgctcttctgtattgaaagactcggaatatggttgtttgaagattccaccaagatgtatgnttgatcatccagatgcagataaaacactgaatcaccttatatcggggtttgaaaattttgaaaagaaaatcaactacagattcaagaataaggcttaccttctccaggcttttacacatgcctcctaccactacaatactatcactgantgttaccagcgcttagaattcctgggagatgcgattttggactacctcataaccaagcacctttatgaagacccgcggcagcactccccgggggtcctgacagacctgcggtctgccctggtcaacaacaccatctttgcatcgctggctgtaaagtacgactaccacaagtacttcaaagctgtctctcctgagctcttccatgtcattgatgactttgtgcagtttcagcttgagaagaatgaaatgcaaggaatggattctgagcttaggagatctgaggaggatgaagagaaagaagaggatattgaagttccaaaggccatgggggatatttttgagtcgcttgctggtgccatttacatggatagtgggatgtcactggagacagtctggcaggtgtactatcccatgatgcggccactaatagaaaagttttctgcaaatgtaccccgttcccctgtgcgagaattgcttgaaatggaaccagaaactgccaaatttagcccggctgagagaacttacgacgggaaggtcagagtcactgtggaagtagtaggaaaggggaaatttaaaggtgttggtcgaagttacaggattgccaaatctgcagcagcaagaagagccctccgaagcctcaaagctaatcaacctcaggttcccaatagctgaaaccgctttttaaaattcaaaacaagaaacaaaacaaaaaaaattaaggggaaaattatttaaatcggaaaggaagacttaaagttgntagtgagtggaatgaattgaaggcagaatttaaagtttggttgataacaggatagataacagaataaaacatttaacatatgtataaaattttggaactaattgtagttttagttttttgcgcaaacacaatcttatcttctttcctcacttctgctttgtttaaatcacaagagtgctttaatgatgacatttagcaagtgctcnaaataattgacaggttttgtttttttttttttgagtttatgtcagctttgcttagtgttagaaggccatggagcttnnncctccagcagtccctaggatgatgtagattcttctccatctctccgtgtgtgcagtagtgccagtcctgcagtagttgataagctgaatagaaagataaggttttcgagaggagaagtgcgccaatgttgtcttttctttccacgttatactgtgtaaggtgatgttcccggtcgctnntgcacctgatagtaagggacagatttttaatgaacattggctggcatgttggngnntnacattttagttttctgatgccacatagtcttgcataaaaaagggttcttgccttaaaagtgaaaccttcatggatagtctttaatctctgatctttttggaacaaactgttttacattcctttcattttattatgcattagacgttgagacagcgtgatacttacaactcactagtatagttgtaacttattacaggatcatactaaaatttctgtcatatgtatactgaagacattttaaaaaccagaatatgtagtctacggatattttttatcataaaaatgatctttggctaaacaccccattttactaaagtcctcctgccaggtagttcccactgatggaaatgtttatggcaaataattttgccttctaggctgttgctctaacaaaataaaccttagacatatcacacctaaaatatgctgcagattttataattgattggttacttatttaagaagcaaaacacagcacctttacccttagtctcctcacataaatttcttactatacttttcataatgttgcatgcatatttcacctaccaaagctgtgctgttaatgccgtgaaagtttaacgtttgcgataaactgccgtaattttgatacatctgtgatttaggtcattaatttagataaactagctcattatttccatctttggaaaaggaaaaaaaaaaaaa

SEQ ID NO: 94 - DNA, 2100 bp, Homo sapiens
  misc_feature (68)..(68): n is a, c, g, or t
  misc_feature (954)..(954): n is a, c, g, or t
ccagtccaggctgtgaatgttgggcagttgctggccgtaaatgccgaggaggacgcctggttacgggnacaggtcatctcaacagaagagaacaaaataaaggtatgctatgttgactatggttttagtgaaaatgttgaaaaaagcaaagcatacaaattaaacccgaagttttgttcactctcatttcaagctacaaaatgtaagcttgcaggcttggaagtcctaagcgatgaccctgatctagtgaaggtggttgaatctttaacttgtggaaagatctttgcagtggaaatacttgacaaagctgacattccacttgttgttctgtacgatacctcaggagaagatgatatcaatatcaatgccacctgcttgaaggctatatgtgacaagtcactagaggttcacctgcaggttgacgccatgtacacaaatgtcaaagtaactaatatttgctctgatgggacactctactgccaggtgccttgtaagggtctgaacaagctcagtgaccttctacgtaagatagaggactacttccattgcaagcacatgacctctgagtgctttgtttcattacccttctgtgggaaaatctgcctcttccattgcaaaggaaaatggttacgagtagagatcacaaatgttcacagcagccgggctcttgatgttcagttcctggactctggcactgtgacatctgtaaaagtgtcagagctcagggaaattccacctcggtttctacaagaaatgattgcaataccacctcaggccattaagtgctgtttagcagatcttccacaatctattggcatgtggacaccagatgcagtgctgtggttaagagattctgttttgaattgctcggactgtagcattaaggttacaaaagtggatgaaaccagagggatcgcacatgtttatttatttacccctaagaacttccctgancctcatcgcagtattaatcgccagattacaaatgcagacttgtggaagcatcagaaggatgtgtttttgagtgccatatccagtggagctgactctcccaacagcaaaaatggcaacatgcccatgtcgggcaacactggagagaatttcagaaagaacctcacagatgtcatcaaaaagtccatggtggaccatacgagcgctttctccacagaggaactgccacctcctgtccacttatcaaagccaggggaacacatggatgtgtatgtgcctgtggcctgtcacccaggctacttcgtcatccagccttggcaggagatacataagttggaagttctgatggaagagatgattctatattacagcgtgtctgaagagcgccacatagcagtggagaaagaccaagtgtatgctgcaaaagtggaaaataagtggcacagggtgcttttaaaaggaatcctgaccaatggactggtatctgtgtatgagctggattatggcaaacacgaattagtcaacataagaaaagtacagcccctagtggacatgttccgaaagctgcccttccaagcagtcacagctcaacttgcaggagtgaagtgcaaccagtggtctgaggaggcttctatggtgtttcgaaatcatgtggagaagaaacctctggtggcactggtgcagacagtcattgaaaatgctaacccttgggaccggaaagtagtggtctacttagtggacacatcgttgccagacaccgatacctggattcatgattttatgtcagagtatctgatagagctttcaaaagttaattaatgactgcctctgaaaccttgacaactaattcagattttttagcaataacaaaatgtagtaggcttaaaaaaaatcttaactctgctacatggctctgactgctgtgggggattgaaaagaatatgcttatgtttgatgaaagatatttaacaagttttgttttaacagagttgacttttcaaagaaaattgtacttgaattattactataatattagaataaaaatgtttatcaatataaaaaaaaaaaaaaaaaaaaaaaaaaaaaaaaaaaaaaaaaaaaaaaaaaaaaaaaaaaaaaaaaaaaaaaaaaaaaaaaaaaaaaaagggg

SEQ ID NO: 95 - DNA, 518 bp, Homo sapiens
  misc_feature (34)..(34): n is a, c, g, or t
  misc_feature (497)..(500): n is a, c, g, or t
  misc_feature (511)..(511): n is a, c, g, or t
gctcgacgtatttcaaacatttcaaaatgctttnatctatgtttatcacattttaataccacagcacttataatgatgtcactacatatagaagctcaaagttaagggatttgctgaagactgtaaagttaatggaagaattgagacaaaaatccagtgtagctggccacttatccagggctttttctacttcatcacaaggaatgttttgaaagtgtctgctttttttatccttaaaattcacctgtcagggaggcattaaaaatttggaaatgtatgccagcaaaatgtgagctctgtattttttggcattcttatgtttgggtttaataagattaagaaaatgatactgggaattttctttttcctgaaactttgaatcaccctagtaagtcaaagtactaaaaaatgtactagatcattaagacttatgtgctcttactgattgaaagattttttatgttttccttgtaataaaggacctaaaccgaaggtannnnaaaaaaaaaanaaaaaaa

SEQ ID NO: 96 - DNA, 550 bp, Homo sapiens
  misc_feature (14)..(14): n is a, c, g, or t
  misc_feature (25)..(25): n is a, c, g, or t
  misc_feature (29)..(29): n is a, c, g, or t
  misc_feature (55)..(55): n is a, c, g, or t
  misc_feature (70)..(70): n is a, c, g, or t
  misc_feature (73)..(73): n is a, c, g, or t
  misc_feature (106)..(106): n is a, c, g, or t
  misc_feature (121)..(121): n is a, c, g, or t
  misc_feature (123)..(123): n is a, c, g, or t
  misc_feature (125)..(125): n is a, c, g, or t
  misc_feature (127)..(127): n is a, c, g, or t
  misc_feature (168)..(168): n is a, c, g, or t
  misc_feature (270)..(270): n is a, c, g, or t
  misc_feature (357)..(361): n is a, c, g, or t
  misc_feature (382)..(383): n is a, c, g, or t
  misc_feature (385)..(385): n is a, c, g, or t
  misc_feature (394)..(396): n is a, c, g, or t
ggcccccttttttnccagataatantttnaatccagccccattcaccattatttntgcaactggggtgantgntgatgcatgaccggccgccggggtctgggggtntgggttgggggtggncntncnctcccttttggtccctggtaactgggatcacaggacgtctnagacccttgccccctccctccccagagcctgtgtcggacagccagatggtcatcatagtcacggtggtgtcggtgttgctgtccctgttcgtgacatctgtncctgctctgcttcatcttcggccagcacttgcgccagcagcggatgggcacctacggggtgcgagcggcttggaggaggctgccccnnnnnttccggccatagcaaccatgnntngcatggccnnncaccacggtggtcactggaactcagtgtgactcctcagggttgaggtccagccctggctgaaggactgtgacaggcagcagagacttgggacattgccttttctagcccgaatacaaacacctggacttaaaaaaaaaaaaaaaaaaaaaaaaa

SEQ ID NO: 97 - DNA, 4207 bp, Homo sapiens
ccccggttccgctgtcttttctgtctacagtttgcgatccccgcgtccaggatggagcagctgaacgaactggagctgctgatggagaagagtttttgggaggaggcggagctgccggcggagctatttcagaagaaagtggtagcttcctttccaagaacagttctgagcacaggaatggataaccggtacctggtgttggcagtcaatactgtacagaacaaagagggaaactgtgaaaagcgcctggtcatcactgcttcacagtcactagaaaataaagaactatgcatccttaggaatgactggtgttctgttccagtagagccaggagatatcattcatttggagggagactgcacatctgacacttggataatagataaagattttggatatttgattctgtatccagacatgctgatttctggcaccagcatagccagtagtattcgatgtatgagaagagctgtcctgagtgaaacttttaggagctctgatccagccacacgccaaatgctaattggtacggttctccatgaggtgtttcaaaaagccataaataatagctttgccccagaaaagctacaagaacttgcttttcaaacaattcaagaaataagacatttgaaggaaatgtaccgcttaaatctaagtcaagatgaaataaaacaagaagtagaggactatcttccttcgttttgtaaatgggcaggagatttcatgcataaaaacacttcgactgacttccctcagatgcagctctctctgccaagtgataatagtaaggataattcaacatgtaacattgaagtcgtgaaaccaatggatattgaagaaagcatttggtcccctaggtttggattgaaaggcaaaatagatgttacagttggtgtgaaaatacatcgagggtataaaacaaaatacaagataatgccgctggaacttaaaactggcaaagaatcaaattctattgaacaccgtagtcaggttgttctgtacactctactaagccaagagagaagagctgatccagaggctggcttgcttctctacctcaagactggtcagatgtaccctgtgcctgccaaccatctagataaaagagaattattaaagctaagaaaccagatggcattctcattgtttcaccgtattagcaaatctgctactagacagaagacacagcttgcttctttgccacaaataattgaggaagagaaaacttgtaaatattgttcacaaattggcaattgtgctctttatagcagagcagttgaacaacagatggattgtagttcagtcccaattgtgatgctgcccaaaatagaagaagaaacccagcatctgaagcaaacacacttagaatatttcagcctttggtgtctaatgttaaccctggagtcacaatcgaaggataataaaaagaatcaccaaaatatctggctaatgcctgcttcggaaatggagaagagtggcagttgcattggaaacctgattagaatggaacatgtaaagatagtttgtgatgggcaatatttacataatttccaatgtaaacatggtgccatacctgtcacaaatctaatggcaggtgacagagttattgtaagtggagaagaaaggtcactgtttgctttgtctagaggatatgtgaaggagattaacatgacaacagtaacttgtttattagacagaaacttgtcggtccttccagaatcaactttgttcagattagaccaagaagaaaaaaattgtgatatagataccccattaggaaatctttccaaattgatggaaaacacgtttgtcagcaaaaaacttcgagatttaattattgactttcgtgaacctcagtttatatcctaccttagttctgttcttccacatgatgcaaaggatacagttgcctgcattctaaagggtttgaataagcctcagaggcaagcgatgaaaaaggtacttctttcaaaagactacacactcatcgtgggtatgcctgggacaggaaaaacaactacgatatgtactctcgtaagaattctctacgcctgtggttttagcgttttgttgaccagctatacacactctgctgttgacaatattcttttgaagttagccaagtttaaaataggatttttgcgtttgggtcagattcagaaggttcatccagctatccagcaatttacagagcaagaaatttgcagatcaaagtccattaaatccttagctcttctagaagaactctacaatagtcaacttatagttgcaacaacatgtatgggaataaaccatccaatattttcccgtaaaatttttgatttttgtattgtggatgaagcctctcaaattagccaaccaatttgtctgggccccctttttttttcacggagatttgtgttagtgggggaccatcagcagcttcctcccctggtgctaaaccgtgaagcaagagctcttggcatgagtgaaagcttattcaagaggctggagcagaataagagtgctgttgtacagttaaccgtgcagtacagaatgaacagtaaaattatgtccttaagtaataagctgacctatgagggcaagctggagtgtggatcagacaaagtggccaatgcagtgataaacctacgtcactttaaagatgtgaagctggaactggaattttatgctgactattctgataatccttggttgatgggagtatttgaacccaacaatcctgtttgtttccttaatacagacaaggttccagcgccagaacaagttgaaaaaggtggtgtgagcaatgtaacagaagccaaactcatagttttcctaacctccatttttgttaaggctggatgcagtccctctgatattggtattattgcaccgtacaggcagcaattaaagatcatcaatgatttattggcacgttctattgggatggtcgaagttaatacagtagacaaataccaaggaagggacaaaagtattgtcctagtatcttttgttagaagtaataaggatggaactgttggtgaactcttgaaagattggcgacgtcttaatgttgctataaccagagccaaacataaactgattcttctggggtgtgtgccctcactaaattgctatcctcctttggagaagctgcttaatcatttaaactcagaaaaattaatcattgatcttccatcaagagaacatgaaagtctttgccacatattgggtgactttcaaagagaataaaacactatttcccttgccttttcatactagggcagtatctcctctagctagtgcccatacagaaaattctatcaccatacaaaatttaatgcagtatttatgttttaaagcacaggtgtaccgaaaactgtgaaaagtctgaatttatgggttctatgcatgcatttttgcctaacctagagaaagagtttgataaatttttaccagctttgaagatggattaacttttgactttgagctttaaacttttaagtcagacatttcaggactaatttgattttgtagatatcattgtaagaactttatttgaaagactgaataaagggatttgatttgttttcatcatttaagcacagtcttgtgatgatgagaacataagtgtgattcttttctgtattttgaggtccctaatccaaagcccattttgctaggattttttctgctatcagatgtgttttcactctaaacctagtcttttatgacatgaattgattacttcctgttaattttctatcctcccttactatcctccttttttgttttcagtattcagtatttcagtattctagagtagattttgatataaaagaaaataattcttacatcatcttttgcaacaaattttgttttctgaattgataataaatttaaaaagttgattcctattttcacatatgttcatatgcccctatgtttgggggtatcactcagttttcccttttttgtgtaaagatgttttgtaaaacaaaattgtctcaaagtgattatattatatatataaaaagtaacagattttaacaaaggttaaaagattcttggggtaacagattcttctggggttggaaatcttccatttctcttgagggttttttttaatgagtgttaaatatgttaaaatttttatttctacctcatgtgtttttttaaattattacttgaagttttttatttaataaattttttctactaatgg

SEQ ID NO: 98 - DNA, 1153 bp, Homo sapiens
  misc_feature (231)..(232): n is a, c, g, or t
  misc_feature (235)..(235): n is a, c, g, or t
  misc_feature (248)..(249): n is a, c, g, or t
  misc_feature (364)..(364): n is a, c, g, or t
  misc_feature (397)..(397): n is a, c, g, or t
  misc_feature (621)..(621): n is a, c, g, or t
  misc_feature (838)..(838): n is a, c, g, or t
  misc_feature (840)..(848): n is a, c, g, or t
  misc_feature (851)..(851): n is a, c, g, or t
cttttccagttcccgaggcggatccggtgttgcatccttggagcgagctgagagctggagtacagaacctgctaaggccatcaaacctattgatcggaagtcagtccatcagatttgctctgggccggtagtactgagtctaagcactgcggtgaagaagattgtagaaaacagtctggatgctggtgccactaatattgatctaaagcttaaggactatggagtggatcnnatngaagtttcaggcnnaatggatgtggggtagaagaagaaaacttcgaaggcttaactctgaaacatcacacatctaagattcaagagtttgccgacctacctcaggttgaaacttttggctttcgggggnaagctctgagctcactttgtgcactgagtgatntcaccatttctacctgccacgtatcggcgaaggttgggactcgactggtgtttgatcacgatgggaaaatcatccagaaaaccccctacccccaccccagagggaccacagtcagcgtgaagcagttattttctacgctacctgtgcgccataaggaatttcaaaggaatattaagaagaaacgtgcctgcttccccttcgccttctgccgtgattgtcagttncttgagggctccccagccatgcttcctgtacagcctgcaaaactgactcctagaagtaccccaccccacccctgctccttggaggacaacgtgatcactgtattcagctctgtcaagaatggtccaggttcttctagatgatctgcacaaatggttcctctcctccttcctgatgtctgccattagcattggaataaagttcctgctgaaaatccanannnnnnnnnggnccggtgttctggaagtgagagagacaatgtcacacttcaaggaggcagctctctagacaggaaggttattcacgtcccatgtcaagtctagctagagttcagagcaattgagaagtgcaattttatctcctgcctttcattctataccctgcttctgaaccatcgtgttcaactgtgaaactcacactttggtgaccctgactccaaaacttaatacacccaaggtcagccccagtgatctgcttcatagcaaggactttgggtgggtcttcccagggagtagggcacccttcagagaattg

SEQ ID NO: 99 - DNA, 581 bp, Homo sapiens
  misc_feature (40)..(40): n is a, c, g, or t
  misc_feature (105)..(165): n is a, c, g, or t
  misc_feature (336)..(336): n is a, c, g, or t
gcagccaagcctgtgcccaggtgagccaagcaaagagccncagggtcctcatagcctccccacagtgtcctcaattccttaccaccctgggactcaccctcggannnnnnnnnnnnnnnnnnnnnnnnnnnnnnnnnnnnnnnnnnnnnnnnnnnnnnnnnnnnngcgatacaacttgacctcacaagacgtgggctctggcaccagcaataacagccaagcctgtgcccagttcctggagcagtatttccatgactcagacctggctcagttcatgcgcctcttcggtggcaactttgcacatcaggcatcagtagcccgtgtggttggacaacnagggccggggccgggccgggattgaggccagtctagatgtgcagtacctgatgagtgctggtgccaacatctccacctgggtctacagtagccctggtactaccaagaggactggacagtggggaagggggtgggagatgggtgttgatccctgctccctcaagggaatgctataagctggagagagatcctgacaacccccagtgactatctttgtgcccatccctcaaaaaaaaaaaaaaaaa

SEQ ID NO: 100 - DNA, 4300 bp, Homo sapiens
  misc_feature (1)..(1): n is a, c, g, or t
  misc_feature (65)..(65): n is a, c, g, or t
  misc_feature (68)..(68): n is a, c, g, or t
  misc_feature (101)..(101): n is a, c, g, or t
  misc_feature (256)..(256): n is a, c, g, or t
  misc_feature (269)..(269): n is a, c, g, or t
  misc_feature (297)..(297): n is a, c, g, or t
  misc_feature (299)..(299): n is a, c, g, or t
  misc_feature (301)..(301): n is a, c, g, or t
  misc_feature (323)..(323): n is a, c, g, or t
  misc_feature (406)..(406): n is a, c, g, or t
  misc_feature (705)..(705): n is a, c, g, or t
  misc_feature (1078)..(1081): n is a, c, g, or t
  misc_feature (1090)..(1090): n is a, c, g, or t
  misc_feature (1098)..(1098): n is a, c, g, or t
  misc_feature (1117)..(1117): n is a, c, g, or t
  misc_feature (1138)..(1138): n is a, c, g, or t
  misc_feature (1190)..(1190): n is a, c, g, or t
  misc_feature (1324)..(1324): n is a, c, g, or t
  misc_feature (1386)..(1386): n is a, c, g, or t
  misc_feature (1396)..(1396): n is a, c, g, or t
  misc_feature (1398)..(1399): n is a, c, g, or t
  misc_feature (1401)..(1401): n is a, c, g, or t
  misc_feature (1403)..(1403): n is a, c, g, or t
  misc_feature (1405)..(1407): n is a, c, g, or t
  misc_feature (1410)..(1412): n is a, c, g, or t
  misc_feature (1414)..(1418): n is a, c, g, or t
  misc_feature (1425)..(1425): n is a, c, g, or t
  misc_feature (1429)..(1429): n is a, c, g, or t
  misc_feature (1437)..(1437): n is a, c, g, or t
  misc_feature (1445)..(1445): n is a, c, g, or t
  misc_feature (1474)..(1474): n is a, c, g, or t
  misc_feature (1518)..(1524): n is a, c, g, or t
  misc_feature (1683)..(1685): n is a, c, g, or t
  misc_feature (1687)..(1689): n is a, c, g, or t
  misc_feature (1691)..(1694): n is a, c, g, or t
  misc_feature (1717)..(1719): n is a, c, g, or t
  misc_feature (1722)..(1722): n is a, c, g, or t
  misc_feature (1724)..(1725): n is a, c, g, or t
  misc_feature (1728)..(1729): n is a, c, g, or t
  misc_feature (1731)..(1734): n is a, c, g, or t
  misc_feature (1737)..(1738): n is a, c, g, or t
  misc_feature (1740)..(1740): n is a, c, g, or t
  misc_feature (1742)..(1749): n is a, c, g, or t
  misc_feature (1751)..(1751): n is a, c, g, or t
  misc_feature (1753)..(1760): n is a, c, g, or t
  misc_feature (1763)..(1763): n is a, c, g, or t
  misc_feature (1805)..(1805): n is a, c, g, or t
  misc_feature (1810)..(1810): n is a, c, g, or t
  misc_feature (1821)..(1822): n is a, c, g, or t
  misc_feature (1825)..(1825): n is a, c, g, or t
  misc_feature (1844)..(1844): n is a, c, g, or t
  misc_feature (1865)..(1865): n is a, c, g, or t
  misc_feature (2104)..(2104): n is a, c, g, or t
  misc_feature (2139)..(2139): n is a, c, g, or t
  misc_feature (2141)..(2141): n is a, c, g, or t
  misc_feature (2147)..(2152): n is a, c, g, or t
  misc_feature (2175)..(2175): n is a, c, g, or t
  misc_feature (2243)..(2243): n is a, c, g, or t
  misc_feature (2253)..(2253): n is a, c, g, or t
  misc_feature (2262)..(2262): n is a, c, g, or t
  misc_feature (2318)..(2318): n is a, c, g, or t
  misc_feature (2320)..(2334): n is a, c, g, or t
  misc_feature (2336)..(2337): n is a, c, g, or t
  misc_feature (2339)..(2340): n is a, c, g, or t
  misc_feature (2342)..(2342): n is a, c, g, or t
  misc_feature (2350)..(2350): n is a, c, g, or t
  misc_feature (2365)..(2365): n is a, c, g, or t
  misc_feature (2441)..(2441): n is a, c, g, or t
  misc_feature (2794)..(2794): n is a, c, g, or t
  misc_feature (2797)..(2798): n is a, c, g, or t
  misc_feature (2802)..(2802): n is a, c, g, or t
  misc_feature (2805)..(2805): n is a, c, g, or t
  misc_feature (2983)..(2983): n is a, c, g, or t
  misc_feature (3000)..(3000): n is a, c, g, or t
  misc_feature (3205)..(3205): n is a, c, g, or t
  misc_feature (3255)..(3255): n is a, c, g, or t
  misc_feature (3304)..(3304): n is a, c, g, or t
  misc_feature (3330)..(3330): n is a, c, g, or t
  misc_feature (3361)..(3361): n is a, c, g, or t
  misc_feature (3379)..(3379): n is a, c, g, or t
  misc_feature (3387)..(3387): n is a, c, g, or t
  misc_feature (3416)..(3416): n is a, c, g, or t
  misc_feature (3436)..(3436): n is a, c, g, or t
  misc_feature (3443)..(3444): n is a, c, g, or t
  misc_feature (3448)..(3448): n is a, c, g, or t
  misc_feature (3455)..(3457): n is a, c, g, or t
  misc_feature (3614)..(3614): n is a, c, g, or t
  misc_feature (3648)..(3648): n is a, c, g, or t
  misc_feature (3664)..(3664): n is a, c, g, or t
  misc_feature (3671)..(3671): n is a, c, g, or t
  misc_feature (3675)..(3675): n is a, c, g, or t
  misc_feature (3681)..(3681): n is a, c, g, or t
  misc_feature (3695)..(3695): n is a, c, g, or t
  misc_feature (3701)..(3702): n is a, c, g, or t
  misc_feature (3706)..(3707): n is a, c, g, or t
  misc_feature (3717)..(3717): n is a, c, g, or t
ntttcggcacggagaaatgggtcagtgagcaaggctctaattcctagtctccagccatgcctgtngancctgagcccactctcagcacattggacccaggnagatgtaaaaaattcacagaactatgatttggactcaagggtttgtagatttcctccttcattctaatttcagtgtctaaaattcttgcatccgtgaacgagctgggcatttgatgagacagggccgaatactgcagttttcctcctagaaatcntctggggcatttnctttgaactgatgggaacaataaggcanancngtttgcacaaacttgggataantgattttgggataacgatctaccagaatggggatatttcacccttggttctgagatgcaaaccaaagaatatcatgaccagcnttcaggcctcctgaagtatatctctcacattgtcctgttctcatgctgaggagcctgagatccctgtgtggggattagacagtggactgttatgggtgtaggtgaattggcttattttgtctgtccctgtctgaatgtattgcaggaattaaaaaggaccaagaagaggaagaagaccaaggcccaccatgccccaggtaactgagcaattgtgaacagctacttctgtgttgacatctggagactcctggttcagggaaaacagagcgggctgacattatcgattacatcttttcaancaagcctgaattattcctactaacattgctgttggttttcattgcagtagatatttaggtttccatttcttcctccccttatcatttactaacctactgtaggtggaccagacttcaaaaactgtattctcatggcgactgcatggaaacttgagcacattttatggaaaattattgagcacagtcttttcatgatccctgtatgctgtgtgtcctgagggcactaactcagagtgtcctgttactccctcatcagtgtgtcacctggacaattcactgagctcgttctctctctctgtgtgtgtgtgtgtgtgtgtgtgtgtgtgtgtgtctatctgtctttctctttcattcttttccatttggccctgtnnnntcccaacangaaggcantaatttgttacctcattantggatctatccttttagtttnttaaccacttccctatgctacccatgaaacctagttggggctctgttgtgtntgatttcccctggcttattctttactttttcctccttttccaggctcagcagggagctgctggaggtagtagagcctgaagtcttgcaggactcactggatagatgttattcaactccttccagttgtcttgancagcctgactcctgccagccctatggaagttccttttatgcattggaggaaaaacatgttgncttttctctngnngngngnnnaannnannnnnagggganaggngaagaaangaaggggnagaagatcaaagaaggaaagaagaagggnaagaaaagaaggggaagaagatcaaaacccaccatgccccaggnnnnnnngggagctgctggatgagaaagggcctgaagtcttgcaggactcactggatagatgttattcaactccttcaggttgtcttgaactgactgactcatgccagccctacagaagtgccttttatgtattggagcaacagcgtgttggcttggctgttgacnnngnnnannnngaaaagtaccaagaagtggaagnnnacnannacnnannnngcnncngnnnnnnnngngnnnnnnnngangcttaattctgtgttgacacctggagatgccaggtccagggnaaacnagagtgtgttnnatntcatgttttcaacgaaggntgaattactcctactgacatngctgttggttttcattgcagtagatgtttaggtttccatttcttcctccccttatcatttactaacttactataggttgaccatacctcaaaggctgtatggcaactgcatggaatcttgagcaagtttatggaaaattattgagcccactcttttcatgatcactgttcgctgtgtgtcccgagggcactaactcagagtgtcctttgaccccttcatcagtgtgtcacccggccaantcgctgagctcactttctcctctctctctctctcncnctctcnnnnnncctgtctttctctttcattcttntctacctggccctggtctatcccaacataaaggcaataattcattacctcattaatggatctgtcctntttctttttnaacagttcnttatgttagccatgaaatctagctggggctgtgtggtttctgattccccctggctnannnnnnnnnnnnnnntnntnntncaggctcngcagggagctgctgnatgagaaagagcctgaagtcttgcaggactcactggatagatgttattcgactccttcaggttatcttgaactgcnctgacttaggccagccctacagcagtgctgtttactcattggaggaacagtaccttggcttggctcttgacgtggacagaattaaaaaggaccaagaagaggaagaagaccaaggcccaccatgccccaggctcagcagggagctgctggaggtagtagagcctgaagtcttgcaggactcactggatagatgttattcaactccttccagttgtcttgaacagcctgactcctgccagccctatggaagttccttttatgcattggaggaaaaacatgttggcttttctcttgacgtgggagaaattgaaaagaaggggaaggggaagaaaagaaggggaagaagatcaaanaannaaanaanaaggggaagaaaagaaggggaagaagatcaaaacccaccatgccccaggctcagcagggagctgctggatgagaaagggcctgaagtcttgcaggactcactggatagatgttattcaactccttcaggttgtcttgaactgactgactcatgccagccctacagaagtgccttttangtattggagcaacagcntgttggcttggctgttgacatggatgaaattgaaaagtaccaagaagtggaagaagaccaagacccatcatgccccaggctcagcagggagctgctggatgagaaagagcctgaagtcttgcaggactcactggatagatgttattcgactccttcaggttatcttgaactgcctgacttaggccagccctacagcagtgctgtntactcattggaggaacagtaccttggcttggctcttgacgtggacagaantaaaaaggaccaagaagaggaagaagaccaaggcccaccatgccccagnctcagcagggagctgctggaggtagntagagcctgaagtcttgcaggactcactggnatagatgttattcaactncttccagnttgtcttgaacagcctgactcctgccagnccctatggaagttccttttnatgcatnnggangaaaaannnatgttggctttctctcttgacgtgggagaaattgaaaagaaggggaagggcgcaacagaaacagaaggggaagaagatcaaagaaggaaagacgaaggggcacgacccgaacggggacagaagatcaaaccccacatgccccaggctcagccagcgngctgctggatgagaaagggcctgaagtcttgcanggactcactggatagnatgttanttcnactccntcaggttgtcttgnaactgnntganntcatgccagncctacagaagtgccttttatgtatggagcaacagcatgttggcttggctgttgacatggatgaaattgaaaagtaccaagaagtggaagaagaccaagacccatcatgccccaggctcagcagggagctgctggatgagaaagagcctgaagtcttgcaggactcactggatagatgttattcgactccttcaggttatcttgaactgcctgacttaggccagcctacagcagtgctgtttactcattggaggaacagtaccttggcttggctcttgacgtggacaaaattaaaaagaaggggaaggggaaaaaaagaaggggaagaagatcaaagaaggaaagaagactgggacagacacagaaggggaagaagatcaaaaccaccatgccccaggctcaacggcgtgctgatggaagtggaagagcgtgaagtcttacaggactcactggatagatgttattcgatccgtcatgtactttgaactacctgactcattccagcactacagaagtgtgtttcactcatttgaggaacagcacaatcagcttcgccctttaacgtggacaataggttttttact

SEQ ID NO: 101 - DNA, 1720 bp, Homo sapiens
agaccatggaccctggaccttgtagatgagggacactggcctggccctcgggtcttcggaggacgtagggggctggcatgggtgccgactggctgcctgacttcatcatgctccctgcacttaggctgcgtgggacaagggctgtgttgtcacagcaggaataggttttcctctgttggcctccctttcctccaccctggcctcaaatggatgccagatgccaaccccagttctggccacgtacagccagcgggtcagcccagaggcagcctcagctccagggctaaggactctcggctcccattttctctgctggcgtttctgctgtgcccagcagtggctgctggggaagcagctgcagcaggagggagacggtcttgcctctcagcccctccctgccccaccccagctcctgccctggaaatctggagccccttggagctgagctggacggggggccagctgcgagcatgtgcactaaacgcagccctttccaggggaagagaacaggatggagaatggaaggaaagccccccaggcttcgtgaattgcaagaagggactcttccaggatgacactaggaacagggctagggcactcgctcagtccctaggggcttgtttgttctttattattgtgtttaaatccttatagagcaatatcaggatggtgttaataggtctgcctcagaatgagaatcaatccttttagaaaacctttatactaagcctcctcttcaaaattcacagtggcgattagcggactggagtctggtggcgattagcggactggagtctggggacatccgtggcaaagacaccagctcaactttagtgcttcccaactttatttagaatgacatggggtgggtgtctggtgtgtgtgttttccctacgcacctcccatagctattaacaactgaggaaggccagtgcagaatatttttggagaacgattttttttttaaataatatatcattcctatggggggaaagccttttttttctttttggctgagttattccctccctcccctcaataccctcagtactgactacttccctttcttttctcaggcctccccccaccgacttttgaggccagggttggccagatttagcaaaaccaaaacagagtgctgagttaaacgcaaatttcaggtaaacaaaagataattttctagcattaatatgccccacgcaatatttggaacacttatgtgaaaaatgatttgtttttctgaaattcacgtttctctctgagtcctgtaactgtccccgaggggattgagcagaagctcgggtatgagccctgaggttgactgccggttatttttctgtcctgggaacagcctgacccacctccctgtctccatgtagccagtgaggggagggggagacacagaaccaaccacagccaggggcgtccccatggcgactgtggcccggcccctcctctcttgcctgactctcctctcttgcctgactctagacactaacttagttccaggttcggtgccctgttggtgctcctgtttccaatagcttaggtcccatggtgggggaggaacctcaggggctatgcagcccccgccagctgccctcgaatcccgtccaggccaattccagattctaaactgatttttttcatgatattgtcaaaacagtgaggaaacattaaaaaaaaagccctaaagcaaaaaaaaaaaaaaaaaaaaaaa

SEQ ID NO: 102 - DNA, 2522 bp, Homo sapiens
ctcccagggcatagaattactgagttagaagaaataactggtttatttttacataggatgtgatgtctaatattgtactaaaaatgaggatgcttatgctatactccactggtactatccactggatttatttattttttttattttttgagacggagtctcgctctgtcgcccaggctggagcacagtggtgcaaacttggctcactgcaagctctgcctcctgggttcacaccattctcctgcctcggcctccagagtagctgggactacaggtgcccgccatcacacctggctaattttttttgtattttttagtagagacgggggtttcaccgtgttggccaggatgccctcgatcttctgacctcatgatccacccgcctcggcctcccaaaatgctgggattgtaggcgtgagctaccgcacctggctgtttttgtatttagatagagtttaagtgcaaagtaatctgctgatttaaggttgttttaaattcatatctgaggaataaaggatggacaggcaatttccatccctttgatgttccataattctagctatttatatcattcatttgccccttcagcatggattggcttacacctgtaatacgttccagaatagctggatttcttttgttttcccatcggtgattttcatagagtagatgctcaatgacatataatgcagaaaggccaaaaatagaggtaagtaaagctatgaaagaaaagaagaacgaaagaggaagcagagtagtttgattttgtttattgctgcttaaaccagagagatatgttattctggaagggtgatttgcttgtttttacacatatgcagcctgactgttttaggcttggcttcttttttgtttgtttgagatggagtgtcgctcttgttgcccaggctggagtgcagtggcacgatctcggctcactgcaacctccgcctcctgggttcaagggattctcctgcctcagcctccccagtagctgggattacaggtgctcgccaccacacccggctaatttttacatttttagtagaggcggagtttcgccatgttagccaggctggtcttgaactcctggcctcaggtgatccacccacttcagcctcccaaagtgctgggattacaggtgtgagctatggcacccggctggcttatttcttataggctttgggccgttgctaattttccagctgatataatacaatccagctttattcgaaagataagtattctaactcttgttcggtgtttattcaaacttgtgtttgcatgtatttgtttggactataaattttgagactatagtgagtatgtttttgactataatattttaaatggaagatgaaatttaaattagtatttgcttgtttctttttacaataaaataggtagctttgcagtttggggagggctgttttccatgattgactgtagtatggttcaagtcagaggaaaggaagatccctggaactccatcacaagtggtgccttaacgggagccatactggcagcaagaaatggaccagtggccatggttgggtcagccgcaatgggtggcattctcctagctttaattgaaggagctggtatcttgttgacaagatttgcccctgcacagtttcccaatggtcctcagtttgcagaagacccctcccagttgccttcaactcagttaccttcctcaccttttggagactatcgacaatatcagtaggacttctttcctaggatttctttaacagaacgagttgtggttcgagaaggatttcagaagatcaagttacagtctgtttttaaaaccataggtgggacagctatggccaataggctataaagagacatttagcacttttttctatttaaaggaacaagcggggaagggtgctaaaagataatacgtttatttattcacacttgaattgcatttgtgatcaaaataaatgtttaaatcgctaaaggaaaatacagtaagtgcttgaaagatgaaggaccaaaaggccaaaaaacagtgaaatatgatcatcatttccttgcggacttctctgcctggttttgtgtgttctgttattcaaacaataaaaagctggtggaacttactctttcttttaagataagttgtagacttcgatgtttcatgctcatgtacttcaaataatgcatgttttatagttagtccctcatcacttgaagtgacttctgagaattatgcagagtcaacatggatcatttcacagtgagatgctttatggattgaaggatatggtaaaatgtttatagtttactttgaaagtaaaatatactatgtcttggttttgaggatattggatacaaaactctcttcctttagggctactgagtcttgattcctgatcatcagaaatttcaccagaaacaacttgcttccaatatacccaattctatatgaagaattcatggagagtgtactggcactggaagagtttagtgtttcttgtatgcttgaaaataaagtatgtactgttttgaatgtg

SEQ ID NO: 103 - DNA, 2740 bp, Homo sapiens
agactaccggcggcgacgaccacgggagcatggcggacaccgacctgttcatggaatgtgaggaggaggagttggagccatggcagaaaatcagtgatgtcattgaggactctgtagttgaagattataattcagtggataaaactaccacagtttctgtgagccagcagccagtctcggctccagtgcccatcgctgcccatgcttctgttgctgggcacctctctacatccaccaccgttagtagcagcggggcacagaacagcgacagtacaaagaagactcttgtcacactaattgccaacaacaatgctggcaatcctttggtccagcaaggtggacagccactcatcctgacccagaatccagccccaggtctgggcacaatggttactcaaccagtattgaggcctgttcaggtcatgcagaatgccaatcatgtgactagttccccggtggcctcacaaccaatatttatcactacgcagggatttcctgtaaggaatgtccggcctgtacaaaatgcaatgaatcaggttgggattgtgctgaacgtacagcaaggccaaacggttagaccaattacactagttccagccccaggtacccagtttgttaagccgacagttggagttccacaagtgttctcccagatgacccctgtgaggccaggctccacaatgcctgtgaggcccaccaccaacaccttcaccaccgtcatcccggccactcttaccattcggagcaccgtcccacagtcccagtcccagcagaccaagtccactcccagcacttctaccactcccactgccacacagccaacctcactggggcaactagctgttcagtctccaggccagtcaaaccagaccacgaatcccaagctagctccctccttcccctctccacctgcagtgagcattgccagctttgtcactgtgaagcgacctggtgttacaggcgaaaatagcaatgaagtggccaaattggtgaatacccttaacaccatcccttccctgggccagagtcctgggccagtggtggtgtccaacaacagctctgctcatggctctcaaagaaccagcggacctgagtcttcaatgaaaggtacaacaacctgaaagactctgagcagccagtcattcaaaaacattaataaagtgtttgttgtatcagagctttatactcagaaatagaaaaataaaataaaatacagctgctgtagtttgttcttacagaaactttagtaaggagaaagccacttacaaaaagtgtaactgaatcagctccaagaaattatgtgtgtaattgtgctttggagattagtgaaattgattgattaaagatgggtgagataatgaaagataacttcatggaagagatggatttctgagcaaggttttaaagttaggatttggtagagagatcttcaggttgagaatgatgagcatgagggttttcagtggtctagagcaggggtcggcaaatgttttctgtaaagggcctagtagtaaagttgtaggctttgtgcacaatatatagcctctgttgcagctattaactgtgctgttgtggtggggaagcagccacagatacataaacgaatgagcatggctgtgctccactaaaaactatttatggactctgaaatttaagtttcataaaattttcatgtgtcgaaaagttttattcttttatttcaaccatttaaaaataaaaaccgcaaggtatagtggctcacacctcatcccagcattatgggaggccaagacgggaggatcacttgagcctaggagtttgagaccagcctgggcaacatggtgagatcccatctctacaaaaaaaaaaaaaaaaagattagccaggcgtggtggtgtatgtctgcagtcctcgctactcagaagtctgaggtgagaggatggcttgggcttgaacccagaaggttgagcctgcagtgagccatgagcatgccactgcaacagaacgacaccctgtctcaaaaaaagtaaaaacctttaaaacatggtgttgggaaaactagatatccatgtccaaaagaagttggatcttaccttacaataaatacaaaaattaactcaaaatggatcaaagacctaaatgaactaaaactataagactcttagaaaaattataggacaaaaagcttcatgatactggatttgacagtgattactatttcttggatatgacaccaaaagcatacgcaagaaaagaaaaaatgagtaaattaaattatatcaaaatttaaaacttttgtgcaggacgttgtcaacacagtgaaaagggaagccacagaatgggagaaaatatttgcaaattatgtatctaataaggggttaatatccagaatatataaagaatttgtgcagttcaacaacaaaaaaactcccaaacaacctttttaaaaaatagacaaaggactcgctgggcgtggtggttcatgcctgtaatcccagcactttgagaggccaaggcaggtggatcacgaggtcaggagtccaagaccagcctgaccaataatggtgaaaccccgtctatactaaaaatacaaaaattagccaggcgtggtggtgtgtgcctgtattcccagctgctcgggaggctgagacacaagaattgcttgaacctggaaggcagaggttgtggtgagtcgagatcgtgccactgcactccagtctgggcaacagagaaagaccccatctcaaaaaaaaaaaaaaaa

SEQ ID NO: 104 - DNA, 2243 bp, Homo sapiens
  misc_feature (102)..(102): n is a, c, g, or t
  misc_feature (156)..(156): n is a, c, g, or t
  misc_feature (493)..(493): n is a, c, g, or t
  misc_feature (498)..(498): n is a, c, g, or t
  misc_feature (506)..(506): n is a, c, g, or t
  misc_feature (530)..(530): n is a, c, g, or t
  misc_feature (535)..(535): n is a, c, g, or t
  misc_feature (539)..(539): n is a, c, g, or t
  misc_feature (561)..(561): n is a, c, g, or t
  misc_feature (568)..(568): n is a, c, g, or t
  misc_feature (575)..(576): n is a, c, g, or t
  misc_feature (580)..(580): n is a, c, g, or t
  misc_feature (583)..(583): n is a, c, g, or t
  misc_feature (588)..(588): n is a, c, g, or t
  misc_feature (594)..(595): n is a, c, g, or t
  misc_feature (597)..(597): n is a, c, g, or t
  misc_feature (599)..(599): n is a, c, g, or t
  misc_feature (603)..(603): n is a, c, g, or t
  misc_feature (609)..(611): n is a, c, g, or t
  misc_feature (624)..(624): n is a, c, g, or t
  misc_feature (630)..(630): n is a, c, g, or t
  misc_feature (632)..(632): n is a, c, g, or t
  misc_feature (1562)..(1562): n is a, c, g, or t
  misc_feature (1570)..(1570): n is a, c, g, or t
  misc_feature (1577)..(1577): n is a, c, g, or t
  misc_feature (1620)..(1620): n is a, c, g, or t
  misc_feature (1633)..(1633): n is a, c, g, or t
  misc_feature (1655)..(1655): n is a, c, g, or t
  misc_feature (1680)..(1680): n is a, c, g, or t
  misc_feature (1688)..(1688): n is a, c, g, or t
  misc_feature (1708)..(1708): n is a, c, g, or t
  misc_feature (1726)..(1726): n is a, c, g, or t
  misc_feature (1757)..(1757): n is a, c, g, or t
  misc_feature (1773)..(1773): n is a, c, g, or t
  misc_feature (1792)..(1793): n is a, c, g, or t
  misc_feature (1801)..(1801): n is a, c, g, or t
  misc_feature (1803)..(1803): n is a, c, g, or t
  misc_feature (1810)..(1810): n is a, c, g, or t
  misc_feature (1821)..(1821): n is a, c, g, or t
  misc_feature (1838)..(1838): n is a, c, g, or t
  misc_feature (1850)..(1850): n is a, c, g, or t
  misc_feature (1855)..(1855): n is a, c, g, or t
  misc_feature (1866)..(1866): n is a, c, g, or t
  misc_feature (1874)..(1874): n is a, c, g, or t
  misc_feature (1890)..(1890): n is a, c, g, or t
  misc_feature (1899)..(1899): n is a, c, g, or t
  misc_feature (1914)..(1914): n is a, c, g, or t
  misc_feature (1946)..(1946): n is a, c, g, or t
  misc_feature (1961)..(1962): n is a, c, g, or t
  misc_feature (1974)..(1974): n is a, c, g, or t
  misc_feature (2006)..(2006): n is a, c, g, or t
  misc_feature (2021)..(2021): n is a, c, g, or t
  misc_feature (2031)..(2031): n is a, c, g, or t
  misc_feature (2041)..(2041): n is a, c, g, or t
  misc_feature (2047)..(2047): n is a, c, g, or t
  misc_feature (2058)..(2058): n is a, c, g, or t
  misc_feature (2067)..(2067): n is a, c, g, or t
  misc_feature (2073)..(2073): n is a, c, g, or t
  misc_feature (2099)..(2099): n is a, c, g, or t
cacacacacgaggaggagggttgagctgccgccgccgccgcctctgtcgtcgtcgcgagtgtggagtcgggactggagctgctgccgcggcgacgccggggnatctttgtcgctagctcccggcccttctgccccgccgccttccctcagtcagcnggcgcgggaggccgtgcggcacctgtggaatcctctcaagaggaacagtcattgtgtgaaggttcaaattcagctgttagcatggaactttcagaacctattgtagaaaatggagagacagaaatgtctccagaagaatcatgggagcacaaagaagaaataagtgaagcagagccagggggtggttccttgggagatggaaggccgccagaggaaagtgcccatgaaatgatggaggaggaagaggaaatcccaaaacctaagtctgtggttgcaccgccaggtgctcctaagaaagagcatgtaaatgtagtattcattgggcacgtagatgctnggcangtcaaccnattggaggacaaataatgtatttngactngaantggttgacaaaaggacgcttgnaaaagtntgaaagnnaagnctnaaganaaaaanncngngaancttggnnnacttgtcttgggnccttanancacaaatcaggaagaacgagacaagggtaaaacagtagaagtgggtcgtgcctattttgaaaccgaaaagaagcatttcacaattctagatgcccctggccacaagagttttgtcccaaatatgattggtggtgcctctcaagctgatttggctgtgctggtaatctcagccaggaaaggagagtttgaaactggatttgaaaaaggaggacagacaagagaacatgcaatgttggcaaagacagcaggtgtaaaacacctaattgtgctaattaataagatggatgatccaacagtaaattggagcaatgagagatatgaagaatgtaaggagaaactagtgccatttttgaaaaaagttggcttcaatcccaaaaaggacattcactttatgccctgctcaggacttactggagcaaatctcaaagagcagtcggatttctgtccttggtacattggattaccgtttattccatatctggataatttgccgaacttcaatagatcagttgatggaccaatcaggctgccaattgtggataagtacaaggatatgggcactgtggtcctgggaaagctggaatcaggatctatttgtaaaggccagcagcttgtgatgatgccaaacaagcacaacgtggaagttcttggaatactttccgatgatgtagagactgataccgtagccccaggtgaaaacctcaaaatcagactgaaaggaattgaagaagaggagattcttccagggtttatactttgtgatcctaataatctttgtcattctggacgcacatttgatgcccagatagtgattatagagcacaaatccatcatctgcccaggctataatgcggtgctgcatattcatacctgtattgaggaggtggaaataacagccttaatctgcttggtagacaaaaaatcaggagnaaaaagtnagacccnaccccgttttgtgaaacaagatcaagtatgcattgctcgcttnaaggacagcaggnaccatctgccttgagacctttnaagacttccctcagatgggtcgttntcaccttnaagagatgagggtaagaccnttgcaattggaaaagttnctgaaactggttccagagaaagactaagcanttttcttgatgacccntgcacaatactgtgaggannaaattgancntgcaganagcctacttcnacaccgccttctcttanttttctgcccanttgantaaacctctcncccatatntttgcaaagaggaaanttcacagcnaaagtccacattatngtcagctttctcatattgagagctctgctatngccactgttgaattnntttcccaagatntcctgtccctagccctcacttcaaactctgcnttccttggacagatnttggcaatangctttgtaangtgatngtggacataanttgcctacnaataantgaaaacctacaggaatttttttatnttttcattttccccttaggcatatttagtatttttcccccaggcagatcattctgagtgtgcgagtgtgtgtgcacatgttacaaaggcaactaccatgttaataaaatattcaatttgaaaaaaaaaaaaaaaaagggcggcc

SEQ ID NO: 105 - DNA, 3200 bp, Homo sapiens
ctctgccttcggggacaggcccgagaaacgtgacaacaactggaggtacgatcctcgcttcacggggagttttgacgatgaccccgatccgcacagagacccttatggggaagaggtggaccggcgcagcgtccacagcgagcactcggcacggagcctgcacagcgcacacagcctggccagccgccgcagcagcctcagctcccactcgcaccagagtcagatttacagaagccacaatgtggctgccggttcctacgaggccccgcttcctccaggctcctttcacggcgattttgcctacggcacctaccgcagcaatttcagcagtggccccggcttcccagagtatggctaccctgcacttggcttcctggagccctccgggcctggcctcccacctggtgtgccacctctgcaggaaaggagacacttgctccaggaagccaggagcccagacccagggatagtgccgcaggaggcgcctgttggaaactcactttccgagctaagcgaagaaaattttgatggaaaatttgctaatctgaccccctcgaggacggtgccagactcggaggcccccccagggtgggatcgtgccgactcgggtcccacgcagccacctctgtctctctcacccgctcccgaaacaaagagacccggacaggcagccaagaaagaaacgaaggaacctaagaagggtgaatcctggttctttcgttggctacctggaaagaaaaagacagaagcttatttgccagatgacaaggacaaatcgattgtttgggatgaaaagaaaaaccagtgggtgaatttaaatgagccagaagaggagaagaaagccccgcccccacctccaacctcgatgcccaagactgtgcaagctgccccgcctgccctcccagggcctcctggagcccccgtgaacatgtactctagaagagcagcaggaaccagagctcgctacgttgacgtcctgaacccaagcgggacccagcggagcgagccggctctcgctcctgcggactttgtcgctccactcgcgccactcccaattccttctaacttgttcgtgccaaccccagtgagaccccagggacgttcgggacggaatgatggcctcctcgctctctcatccccagatgcagaagaaccacagcttccagacgggactggcagggaagggcctgcagcagctaggggcctggccaatccagagcctgccccagagcccaaggttttaagctctgcagcgtcactccctggctctgaactcccctcctccaggcctgagggttcccagggaggagagctttcgcgctgtagttcaatgagttcattatcacgtgaagtgagccagcattttaatcaggctcctggcgacctccctgctgcagggggccctcccagcggggccatgcccttctacaaccctgctcagctggcacaggcctgcgccacctccgggagctcaaggctagggaggattggccagaggaagcacctggtgctgaactaggcttgccctgctgtgaacttgcacttggagccctgacgctgctgttctccccgaagaacccaaccgacctccgcgatctccgtcccgcccccagggagacacagcagtgactcagagctggtcgcacactgtgcctccctcctcaccgcccatcgtaatgaattattttgaaaattaattccaccatcctttcagattctggatggaaagactgaatctttgactcagaattgtttgccgaaaagaatgatgtgactttcttagtcatttaggatgatttaaggatatagtattcctggtcatttaagaatgttcattcattgaagccggagctgtctctgccacaggagagccacatggtcggtagtaaccagggcctctccaagcccagctgtgagtcactgcccagtgagtcccgcgcttcctttaaggtgctgggagcaaagagagggtgactgaggcagaccccaacccctgctctgcaccatctgggccctcgccgtgtttgaacctggctgaatgagtggagggcgctgtgttctcaatcagcgcctccgaggagccgtggggttccttcggcattagttcacggtttttgagagaggccttagttactgcagtgaatttctttcctgttgcaaagacgcttccagcctcactttactttctgtggcctgatgaggaccatgggtgattttgtgtacccaaagcgctggggactgcccaccgtgtggcccagtcactgggaaggagccccagagagccggctgtctgacatgatggctcagggtggtcatccaggttgaaaactgaccgtgtgatgtttgatttgggcttcatttcgtgtgtaggagcacggttagactcactgttaaggaagctggatgcacttctctaaaaggctgcactttccgtgagcacttttcgtggtacaatccacatgacccactttctcccctgggggacgttggttcagaggttggtagcacttggggagagtatcttaacacagtttcttgacagcagctctggaacttagtatttctgccccgagttttgccacactgagactttgagtagctcctggtggactcaaccctgttcaactcagagacgggcctcctctcactgatgcaaagctttaaggcttctctgactgttctgaaactcttcgtattcttgtcaagtctaaagagactgaagaaaagatttaaatactaataaaaatcagtagataatttctgtaggttctgctggaggaatacaaactgtttggtgttttaaatttaagtgtagaaattgtagaatgtggaattagcacagatccttcctggctttctgtttcacttgatcatttagcccagaccacccaggatgttttccaaaatgttccacaggcgtgtcccgctggatccatttgtccttgtcacttggagaaaggccagtccctgtgacggggcagccctctctgtccctcggtcagctcgtgtgaatcctgggacctcttccggtcggctctgcccgctgttctggggtcgactgccacgacttttgattcaagaagcttcctccaggcgggagcggctatttttcctaaatgagaattgttacattgcaaattgttgaataaaatattttgcgctccttcaaaaaaaaaaaaaaaaaaaaaaaaaaaaaaaaa

SEQ ID NO: 106 - DNA, 415 bp, Homo sapiens
cagcatgctttccaactgcctgactgcttgttggcctcaccggtgggagctccagcatctcctttgctcgaaatggaccccaactgctcctgtgccactggtggctcctgcatgtgcgccggctcctgcaagtgcaaagagtgcaaatgcacctcctgcaagaagagctgctgctcctgctgccccgtgggctgtgccaagtgtgcccagggctgcatctgcaaaggggcgttggagaagtgcaactgctatgcctgacgtggggacagctctgctcccagatgtaaatagagtaacctgcacaaacctggattttttaaaaaatacaacactgagccatttgcttcatttctttttatattaaatatgttaatgacaataaaacaatttttacttgaagaaaaaaaatgaaaaa

SEQ ID NO: 107 - DNA, 2094 bp, Homo sapiens
gatgcctgatctcatcaatctagcgggagagacaggataacctgtccgagagtatagcgccactatgactccgccggaaaaattactttaaaaatcgccaaaaattacttggagcaaagggcagtcggcggacgttcgccaaggctggccagtcggccgttttctcgacccggtgatggccgtcatctcgtgacaagaaacttaaggtcgacagaaaattcaggacccggagtcatgggtccctccggtgggtcgtggcaacagtcccccccgccaccgcccggcacccatctatctatattgtcttttgacgctgaagcgtggaggtgccccaggaaagagtttcccaagccctggctgccctcccccggcgcgctgggtcccggtgaggtctctaggtagggttttgacctgtagcagagaaccaattctggagaacagcctcacttctttgattgaatacttacataatgcattggaacatgacatgagattaaggtttaataatgatagaatgaagaccacaataaaagagacctctacttagctcagcaattcttacctttcttacctatttgatgaagatgtcttttgaaaggtgtactgcaaggaacaaaatgtttgtaaattctccttttaccaagaggtttcttttttaattgatgccaaagagttccaatattgaacatcttaagtctgttacttggattacggattgagtttggagcttactcagaggactacaggagagtatccaggaggtggataattactgtaccttcctcatggaaaaagttttatttaaagtgttatttctcattgaatactatcaaaaaggaaaaaaaaatgacctaaacttttgagatagatttggctctagtaagtatttagttatatcacttgcatatctgggagaagaaataagagactatcatcagtacattcccatctactaaaaaaatttattttacacatgtcaagggattacttataacttccattttattactaatagcttgaacccttttaatgaagacctaactcctccaccagaaatttaagtttatgttcttactttgtttacttataaaatacatctcaggtatttcggatgtcttttttttttctaagcctatatgaaatgaaaaatatattggcaaaataaatgtttaaaccttttacgttaaaattactttgaaagatgaaaagttagtgctgtttttgtctacgttatactgaaattaaatgtttataatttatattttgggtttatgtataaatcatggaatttatgcaaaaatatgagtagtacagattctcctctaattctgtaggactttgaataatgtgatatttttcttataattggacccttgtgttttgaagaaatgccaactgcttgaagaatctccttgttatttgtattatttgctatagggttagatgttgagaaattctgctgacaaaaaattttaagccagttttacactaaatgttcctcagtctgattaatttgttattggatgtattctgtatctttcttttgtaatttgtaacttttatccacttagcacgaatgattctattaaagaaaatcattaggaagtggtagaaactttaaatcgccccagagtttgcctgtttccatattttattaccttataatcttcgggagtgcttacacttatggagctaacattttcagagatacagcttcttatagtaacactaaaactttcttcctctttggactgaatacctataattataactatatggtagtttaagtttccttgtgattagtcaaaaataccattttagtatgaagcaatgaagtctattatttgttgtcccataattgagaaagcttaaatacaccttttattaagagtttgtaaattctagcttagtctacacagatttttatatcaatttgtttatatttttattaatgtcatttctggaagtgtgaaaatgttaatgttcaacaagcaacattaaaaatagatttgaaacatttatatatagagaggtacacatttatttactgtttaggtactgaagattatcacttaataaaaaatatatatccca

SEQ ID NO: 108 - DNA, 1033 bp, Homo sapiens
ttactacgactcactatagggaatttggccctcgaggccaagaattcggcacgagggagaatttgccctccgactggttgcaaaacctggagataagttatactgcagactctcaattaatacacagctgttggcacgtgtggaccatctaatgaaagtgggaaagaataacttcagaccaccgcccaaggtggaatccagtgttgtaaggatagaacctaagaatccaccaccacccatcaattttcaggaatgggatggtctagtaaggataacctttgttaggaaaaacaagacactctctgctgcatttaaatcaagtgcagtgcaacaactcttggaaaaaaactacagaattcactgttcagtccataatattataataccagaagatttcagcatagcagataaaatacagcaaatcctaaccagcacaggttttagtgacaaacgggcccgttccatggacatagatgacttcatcagattgctacatggattcaacgcagaaggtattcatttttcctaggtatttggaaaacagaaattttcaaggtcaagaaaagaaatgaattttgtattttttgtatttgagaagataatgcttttgctttactgagacattatttacttgactatttttggttcaatactactactgttgtcaccatttatgattctgaattttaaagttggaaagttctaagtatcaaagtttttaatatataatgctggtccaatctattcataataatcttcaagttcaggagccgcagagacgcacaactttacacttatcatttctaacagtttattgtataaagatgttactcttctatttactgttatatactgtaaggccttctttaggcctttagctctgttcctccagtaataaaaaagttaaaatatgcttcactagtcacacattccccataccatttcgtgttattcacattccccgtaccatttcttgttattcacatgtacagtaaaacaattgtttcttaaattaaaaaaaaaaaaaaaaaaa

SEQ ID NO: 109 - DNA, 3240 bp, Homo sapiens
  misc_feature (647)..(647): n is a, c, g, or t
  misc_feature (1429)..(1429): n is a, c, g, or t
  misc_feature (1970)..(1970): n is a, c, g, or t
  misc_feature (2689)..(2689): n is a, c, g, or t
  misc_feature (3200)..(3200): n is a, c, g, or t
  misc_feature (3224)..(3224): n is a, c, g, or t
  misc_feature (3227)..(3227): n is a, c, g, or t
  misc_feature (3230)..(3236): n is a, c, g, or t
gcggattttcgaagctggggctggcaagaggccgctggacaccacgctccagtcgtcagcccacttcctagctgaacagcgcgaggcggcggcagcgagccgggtcccaccatggccgcgaattattccagtaccagtacccggagagaacatgtcaaagttaaaaccagctcccagccaggcttcctggaacggctgagcgagacctcgggtgggatgtttgtggggctcatggccttcctgctctccttctacctaattttcaccaatgagggccgcgcattgaagacggcaacctcattggctgaggggctctcgcttgtggtgtctcccgacagcatccacagtgtggctccggagaatgaaggaaggctggtgcacatcattggcgccttacggacatccaagcttttgtctgatccaaactatggggtccatcttccggctgtgaaactgcggaggcacgtggagatgtaccaatgggtagaaactgaggagtccagggagtacaccgaggatgggcaggtgaagaaggagacgaggtattcctacaacactgaatggaggtcagaaatcatcaacagcaaaaacttcgaccgagagattggccacaaaaaccccagtgccatggcagtggagtcattcanggcaacagccccctttgtccaaattggcaggtttttcctctcgtcaggcctcatcgacaaagtcgacaacttcaagtccctgagcctatccaagctggaggaccctcatgtggacatcattcgccgtggagactttttctaccacagcgaaaatcccaagtatccagaggtgggagacttgcgtgtctccttttcctatgctggactgagcggcgatgaccctgacctgggcccagctcacgtggtcactgtgattgcccggcagcggggtgaccagctagtcccattctccaccaagtctggggataccttactgctcctgcaccacggggacttctcagcagaggaggtgtttcatagagaactaaggagcaactccatgaagacctggggcctgcgggcagctggctggatggccatgttcatgggcctcaaccttatgacacggatcctctacaccttggtggactggtttcctgttttccgagacctggtcaacattggcctgaaagcctttgccttctgtgtggccacctcgctgaccctgctgaccgtggcggctggctggctcttctaccgacccctgtgggccctcctcattgccggcctggcccttgtgcccatccttgttgctcggacacgggtgccagccaaaaagttggagtgaaaagaccctggcacccgcccgacacctgcgtgagccctaggatccaggtcctctctcacctctgacccagctccatgccagagcaggagccccggtcaattttggactctgcacnccctctcctcttcaggggccagacttggcagcatgtgcaccaggttggtgttcaccagctcatgtcttccccacatctcttcttgccagtaagcagctttggtgggcagcagcagctcatgaatggcaagctgacagcttctcctgctgtttccttcctctcttggactgagtgggtacggccagccactcagcccattggcagctgacaacgcagacacgctctacggaggcctgctgataaagggctcagccttgccgtgtgctgcttctcatcactgcacacaagtgccatgctttgccaccaccaccaagcacatctgtgatcctgaagggcggccgttagtcattactgctgagtcctgggtcaccagcagacacactgggcatggacccctcaaagcaggcacacccaaaacacaagtctgtggctagaacctgatgtggtgtttaaaagagaagaaacactgaagatgtcctgaggagaaaagctggacatatactgggcttcacacttatcttatggcttggcagaatctttngtagtgtgtgggatctctgaaggccctatttaagtttttcttcgttactttgctgcttcatgtgtactttcctaccccaagaggaagttttctgaaataagatttaaaaacaaaacaaaaaaaacacttaatatttcagactgttacaggaaacaccctttagtctgtcagttgaattcagagcactgaaaggtgttaaattggggtatgtggtttgattgataaaaagttacctctcagtattttgtgtcactgagaagctttacaatggatgcttttgaaacaagtatcagcaaaaggatttgttttcactctgggaggagagggtggagaaagcacttgctttcatcctctggcatcggaaactcccctatgcacttgaagatggtttaaaagattaaagaaacgattaagagaaaaggttggaagctttatactaaatgggctccttcatggtgacgccccgtcaaccacaatcaagaactgaggcctgaggctggttgtacaatgcccacgcctgcctggctgctttcacctgggagtgctttcgatgtgggcacctgggcttcctagggctgcttctgagtggttctttcacgtgttgtgtccatagctttagtcttcctaaataagatccacccacacctaagtcacagaatttctaagttccccaactactctcacacccttttaaagataaagtatgttgtaaccaggangtcttaaatgattctttgtgtaccttttctgtcatattcagaaaccgttttgtgcctgctgggagtaattcctttagcaattaagtatttggtagctgaataaggggtcagaacttctgaaaccagagatctgtaatcatctctattggcctggggtgcctgtgctataaatgagtttcttcacatgaaaaacacagccagcccaagatgacttatctgggtttaggattcaatagtattcactaactgcttattacatgagcaatttcatcaaatctccaaactcttaaaggatgctttcggaaaacacgctgtatacctagatgatgactaaatgcaaaatccttgggctttggtttttttctagtaaggattttaaataactgccgacttcaaaagtgttcttaaaacgaaagataatgttaagaaaaatttgaaagctttggaaaaccaaatttgtaatatcattgtattttttattaaaagttttgtaataaatttctaaattatnaaaaaaaaaaaaaaaaaaaaaaanaanaannnnnnngggg

SEQ ID NO: 110 - DNA, 2237 bp, Homo sapiens
caaacagcagaaggaggtagagaaggttaaaccccagtgtaaggaagttcatcagaccctgattctggacccagcacaaaggaagagactccagcagcagatgcagcagcatgttcagctcttgacacaaatccaccttcttgccacctgcaaccccaatctcaatccggaggccagtagcaccaggatatgtcttaaagagctgggaacctttgctcaaagctccatcgcccttcaccatcagtacaaccccaagtttcagaccctgttccaaccctgtaacttgatgggagctatgcagctgattgaagacttcagcacacatgtcagcattgactgcagccctcataaaactgtcaagaagactgccaatgaatttccctgtttgccaaagcaagtggcttggatcctggccacaagcaaggttttcatgtatccagagttacttccagtgtgttccctgaaggcaaagaatccccaggataagatcctcttcaccaaggctgaggacaatttgttagctttaggactgaagcattttgaagggactgagtttcttaaccctctaatcagcaagtaccttctaacctgcaagactgcccgccaactgacagtgagaatcaagaacctcaacatgaacagagctcctgacaacatcattaaattttataagaagaccaaacagctgccagtcctaggaaaatgctgtgaagagatccagccacatcagtggaagccacctatagagagagaagaacaccggctcccattctggttaaaggccagtctgccatccatccaggaagaactgcggcacatggctgatggtgctagagaggtaggaaatatgactggaaccactgagatcaactcagatcaaggcctagaaaaagacaactcagagttggggagtgaaactcggtacccactgctattgcctaagggtgtagtcctgaaactgaagccagttgccgaccgtttccccaagaaggcttggagacagaagcgttcatcagtcctgaaacccctccttatccaacccagcccctctctccagcccagcttcaaccctgggaaaacaccagcccaatcaactcattcagaagcccctccgagcaaaatggtgctccggattcctcacccaatacagccagccactgttttacagacagttccaggtgtccctccactgggggtcagtggaggtgagagttttgagtctcctgcagcactgcctgctatgccccctgaggccaggacaagcttccctctgtctgagtcccagactttgctctcttctgcccctgtgcccaaggtaatgatgccctcccctgcctcttccatgtttcgaaagccatatgtgagacggagaccctcaaaaagaaggggagccagggcctttcgctgtatcaaacctgcccctgttatccaccctgcatctgttatcttcactgttcctgctaccactgtgaagattgtgagccttggcggtggctgtaacatgatccagcctgtcaatgcggctgtggcccagagtccccagactattcccatcgccaccctcttggttaaccctacttccttcccctgtccattgaaccagccccttgtggcctcctctgtctcacccttaattgtttctggcaattctgtgaatcttcctataccatccacccctgaagataaggcccacatgaatgtggacattgcttgtgctgtggctgatggggaaaatgcctttcagggcctagaacccaaattagagccccaggaactatctcctctctctgctactgttttccccaaagtggaacatagcccagggcctccaccagtcgataaacagtgccaagaaggattgtcagagaacagtgcctatcgctggaccgttgtgaaaacagaggagggaaggcaagctctggagccgctccctcagggcatccaggagtctctaaacaactcttcccctggggatttagaggaagttgtcaagatggaacctgaagatgctacagaggaaatcagtggatttctttgagctaggagaataagagtctggagactgggagccttcacttcggcctccgattggtggcgcatagggtgtaaccaataggaaacccctaaagggtacttaaaccccagattttgcaactggggctcttgagcagcttgctttagcctgctcccactctgtggaatatacttttgcttcaataaatctgtgcttttattgc

SEQ ID NO: 111 - DNA, 780 bp, Homo sapiens
aataatgacctgattttacacaacatccttcccttttctacaagttaatttttttacaaatcattgggttatctcctaaataggttatattttattgcttctagaaacaatgtttcaaaatatatgtgcattatcagtaataattgtataaatatttcccacaacaattttcataattttcaaagactaatttcttgactgaagatatttgctagggaagtgaaactttaaaatttgtagattttaaaaaaatatgttgaatggtgtcatgcaaaggatttatatagtgtgctcccactaactgtacagatcaggacacatatttttagacatctaagtctgtagcttaaatggaggttactcttccatcatctagaatgtttacttagtaatgtgtttcttttattattatagacttactatcagttttatttgccaagtatgcaacaggtatatcactagtatatgaaaatgtaaatatcacttgtgtactcaaacaaaagtggtcttaagcttcaccttgagcagctgtggaaaacctaaaactgctcttttagcataatcacattttctaaatgatttcttggtcctgaaaaagtgattgtattagtttacattgtttggaagatatatggtatatctatcatcataaatattactaaaagttcttggagtcaaaaaaaaaaaaaaaaaaaaatggtgggctgggccgaaaattaaaacatggggggggcgaaggagggaggagggcaggacggggaaagggttccaaaaaagggg

SEQ ID NO: 112 - DNA, 2268 bp, Homo sapiens
  misc_feature (13)..(13): n is a, c, g, or t
gggatttgaaccncgctgacgaagtttggtgatccatcttccgagtatcgccgggatttcgaatcgcgatgatcatcccctctctagaggagctggactccctcaagtacagtgacctgcagaacttagccaagagtctgggtctccgggccaacctgagggcaaccaagttgttaaaagccttgaaaggctacattaaacatgaggcaagaaaaggaaatgagaatcaggatgaaagtcaaacttctgcatcctcttgtgatgagactgagatacagatcagcaaccaggaagaagctgagagacagccacttggccatgtcaccaaaacaaggagaaggtgcaagactgtccgtgtggaccctgactcacagcagaatcattcagagataaaaataagtaatcccactgaattccagaatcatgaaaagcaggaaagccaggatctcagagctactgcaaaagttccttctccaccagacgagcaccaagaagctgagaatgctgtttcctcaggtaacagagattcaaaggtaccttcagaaggaaagaaatctctctacacagatgagtcatccaaacctggaaaaaataaaagaactgcaatcactactccaaactttaagaagcttcatgaagctcattttaaggaaatggagtccattgatcaatatattgagagaaaaagaaacattttgaagaacacaattccatgaatgaactgaagcagcagcccatcaataagggaggggtcaggactccagtacctccaagaggaagactctctgtggcttctactcccatcagccaacgacgctcgcaaggccggtcttgtggccctgcaagtcagagtaccttgggtctgaaggggtcactcaagcgctctgctatctctgcagctaaaacgggtgtcaggttttcagctgctactaaagataatgagcataagcgttcactgaccaagactccagccagaaagtctgcacatgtgaccgtgtctgggggcaccccaaaaggcgaggctgtgcttgggacacacaaattaaagaccatcacggggaattctgctgctgttattaccccattcaagttgacaactgaggcaacgcagactccagtctccaataagaaaccagtgtttgatcttaaagcaagtttgtctcgtcccctcaactatgaaccacacaaaggaaagctaaaaccatgggggcaatctaaagaaaataattatctaaatcaacatgtcaacagaattaacttctacaagaaaacttacaaacaaccccatctccagacaaaggaagagcaacggaagaaacgcgagcaagaacgaaaggagaagaaagcaaaggttttgggaatgcgaaggggcctcattttggctgaagattaataattttttaatatcttgtaaatattcctgtattctcaacttttttccttttgtaaatttttttttttttgctgtcatccccactttagtcacgagatctttttctgctaactgttcatagtctgtgtagtgtccatgggttcttcatgtgctatgatctctgaaaagacgttatcaccttaaagctcaaattctttgggatggtttttacttaagtccattaacaattcaggtttctaacgagacccatcctaaaattctgtttctagatttttaatgtcaagttcccaagttccccctgctggttctaatattaacagaactgcagtcttctgctagccaatagcatttacctgatggcagctagttatgcaagcttcaggagaatttgaacaataacaagaatagggtaagctgggatagaaaggccacctcttcactctctatagaatatagtaacctttatgaaacggggccatatagtttggttatgacatcaatattttacctaggtgaaattgtttaggcttatgtaccttcgttcaaatatcctcatgtaattgccatctgtcactcactatattcacaaaaataaaactctacaactcattctaacattgcttacttaaaagctacatagccctatcgaaatgcgaggattaatgctttaatgcttttagagacagggtctcactgtgttgcccaggctggtctcaaactccaccaaatgtacttcttattcattttatggaaaagactaggctttgcttagtatcatgtccatgtttccttcacctcagtggagcttctgagttttatactgctcaagatcgtcataaataaaattttttctcattgtcaaaaaaaaaaaaaaa

SEQ ID NO: 113 - DNA, 2732 bp, Homo sapiens
aggagccatcctgcccgcggggatcccgtcagccgccttatgatctcctcattgcgtccccctctgcccactggacttggacttcagatctgaccccagacctgccggctacctcgggagggcccacctccccgcccatccagcaagatgccaatcctcaagcaactggtgtccagctcggtgcactccaagcgccgttcccgagcggacctcacggccgagatgatcagcgccccgctgggcgacttccgccacaccatgcacgttggccgggccggagacgcctttggggacacctccttcctcaatagcaaggctggcgagcccgacggcgagtccttggacgaacagccctcttcttcatcttccaaacgcagtctcctgtccaggaagttccggggcagcaagcggtcacagtcggtgaccaggggggagcgggagcagcgtgacatgctgggctccctgcgggactcggccctgtttgtcaagaatgccatgtccctgccccagctcaatgagaaggaggccgcggagaagggcaccagtaagctgcccaagagcctgtcatccagccccgtgaagaaggccaatgacggggagggcggcgatgaggaggcgggcacggaggaggcagtgccccgtcggaatggggccgcgggtccacattcccctgaccccctcctcgatgagcaggcctttggggatctgacagatctgcctgtcgtgcccaaggccacgtacgggctgaagcatgcggagtccatcatgtccttccacatcgacctggggccctccatgctgggtgacgtcctcagcatcatggacaaggaggagtgggaccccgaggagggggagggtggttaccatggcgatgagggcgccgctggcaccatcacccaggctcccccgtacgccgtggcggcccctcccctggcaaggcaggaaggcaaggctggcccagacttgccctccctcccctcccatgctctggaggatgaggggtgggcagcagcggcccccagccccggctcagcccgcagcatgggcagccacaccacacgggacagcagctccctctccagctgcacctcaggcatcctggaggagcgcagccctgccttccgggggccggacagggcccgggctgctgtctcaagacagccagacaaggagttctccttcatggatgaggaggaggaggatgaaatccgtgtgtgaggcggacagtgggtggccaccgggagctcttggctgcatctcctccctgcccccaccccactatgacctttgaccctacggcgcaggggcagccaggacccttgattcagaccatggaccctggaccttgtagatgagggacactggcctggccctcgggtcttcggaggacgtagggggctggcatgggtgccgactggctgcctgacttcatcacgctccctgcacttaggctgcgtgggacaagggctgtgttgtcacagcaggaataggttttcctctgttggcctcccttttcctccaccctggcctcaaatggatgccagatgccaaccccagttctggccacgtacagccagcgggtcagcccagaggcagcctcagctccagggctaaggactctcggctcccattttctctgctggcgtttctgctgtgcccagcagtggctgctggggaagcagctgcagcaggagggagacggtcttgcctctcagcccctccctgccccaccccagctcctgccctggaaatctggagccccttggagctgagctggacggggggccagctgcgagcatgtgcactaaacgcagccctttccaggggaagagagcaggatggagaatggaaggaaagccccccaggcttcgtgaattgcaagaagggaccctggtgtgtgtgttttccctacgcacctcccatagctattaacaactgaggaaggccagtgcagaatatttttggagaacgattttttttttaaataatatatcattcctatggggggaaagccttttttttctttttggctgagttattccctccctcccctcaataccctcagtactgactacttccctttcttttctcaggcctccccccaccgacttttgaggccagggttggccagatttagcaaaaccaaaacagagtgctgagttaaacgcaaatttcaggtagacaaaagataattttctagcattaatatgccccacgcaatatttggaacacttatgtgaaaaatgatttgtttttctgaaatttacgtttctctctgagtcctgtaactgtccccgaggggattgagcagaagctcgggtatgagcccctgaggttgactgccggttatttttctgtcctgggaacagcctgacccacctccctgtctccatgtagccagtggggggagggggagacacagaacctaccacagccaggggcgtccccatggcgactgtggcccggcccctcctctcttgcctgactctcctctcttgcctgactctagacactaacttagttccaggttcggtgccctgttggtgctcctgtttccaatagcttaggtcccatggtgggggaggaacctcaggggctatgcagcccccgccagctgccctcaaatcccgtccaggccagttccagattctaaactgatttttttcatgatattgtcaaaacagtgaggaaacattaaaaaaaaagccctaaagcaaaaaaaaaaaaaaaaa

SEQ ID NO: 114 - DNA, 464 bp, Homo sapiens
ctcccaagatgtcgttcccaaagtataagccgtcgagcctgcgcactctgcctgagaccctcgacccagccgaatacaacatatctccggaaacccggcgggcgcaagccgagcggttggccataagagcccagctgaaacgagagtacctgcttcagtacaacgatcccaaccgccgagggctcatcgaaaatcctgccttgcttcgttgggcctatgcaagaacaataaatgtctatcctaatttcagacccactcctaaaaactcactcatgggagctctgtgtggatttgggcccctcatcttcatttattatattatcaaaactgagagggataggaaagaaaaacttatccaggaaggaaaattggatcgaacatttcacctctcatattaagtctggcaatgatgactatatgtattcctgcctaaataaatcatctattaatcattaaaaaaaaaa

SEQ ID NO: 115 - DNA, 2571 bp, Homo sapiens
tacttgcgtcatggacagctcattgtaaatgatggcattaatttattgggtgtgttagaagaagcaagattttttggtattgactcattgattgaacacctagaagtggcaataaagaattctcaaccaccggaggatcattcaccaatatcccgaaaggaatttgtccgatttttgctagcaactccaaccaagtcagaactgcgatgccagggtttgaacttcagtggtgctgatctttctcgtttggaccttcgatacattaacttcaaaatggccaatttaagccgctgtaatcttgcacatgcaaatctttgctgtgcaaatcttgaacgagctgatctctctggatcagtgcttgactgtgcgaatctccagggagtcaagatgctctgttctaatgcagaaggagcatccctgaaactgtgtaattttgaggatccttctggtcttaaagccaatttagaaggtgctaatctgaaaggtgtggatatggaaggaagtcagatgacaggaattaacctgagagtggctaccttaaaaaatgcaaagttgaagaactgtaacctcagaggagcaactctggcaggaactgatttagagaattgtgatctgtctgggtgtgatcttcaagaagccaacctgagagggtccaacgtgaagggagctatatttgaagagatgctgacaccactacacatgtcacaaagtgtcagatgagaattttaggggctggaggaagatgtaaaagatgaaaatgttttccttatcacttttctttctccacccactcagttgtctagaagaaataacactgtaaggaaatttaaaaaaaaaacatttagaggattatgcttgttttgagtggtgcataagggaaaaaactgactttttttccatattctgatttttaacagaaaagcactcatttaatagatgtagggaaactagatattgctgccttttgaatggggtaggggggtttacctggttttatgaccaggcatagtatctattatatttgcttttaaataggcatgatgtggaaataccatcttggtttgagatgcatttgaggattttaatttatggaaagcacaacatatgcaattatatttattgaattcctagatgcagtatggatatttaaattgttaaaactttatgaaaacttggaaaaggttgttcaggtttataaatagctttagtgatgcctcccctctttaaatacctgtcacaccgtatgaatatggtgagatcagactccctaagactcttttcaggttcatttttataatgtttactttttaggacagaacagtagctaaattaaagtaatatccagttcttactgattgagacagagtggaaagaaagacatcattgtacatcactgtcattccaaaggtacagtgtaactctggatggaggaataacttacctatcactacaacacttacaaatgagaatttctcagaatttcattctaggcaagttccactcaacaccagatcaagcaattctatctatttacactattagcctagttttctcatacagtcatcacaagcataggaagatacttcaaaaccaaaaaaaccaaggtgcatcattaatattcatttaattcaaatgccaaatagtttacatagggccagcttagaaatagatactaaatccagagctactgcaatcaaagcttatatgagtgaatatggtagagttgcctgctaaaaggcaatgtaatataattgcagctagaaccctacagtggggaatgaggaattttaaacacacatttgattgcagccaccaaaaaaaatagacgtaaaaataaaggcatttggctggtccaagatgtaattatcaatcagtcagcacctgtgattcttttacttatttttttgtggtttttttttttaaacaaattttagcccaattttcttgagtcattctctctctgcagcagcagaggaagggcctgtacctccctaccaatgacttggtgtccttattttctaccccaagagcagggatattagctgtgtccaaatgggttctgaattctacagactcatcaacatgaggcaaggaatcattgaaaaccacctgtgtctcctttgggagaatgacatatctttagtatttacgtagcttattcttctatatctacatatgcaaagctttccttaacagtaaagggtacatatgcatagtgggaggagatcagacctttacaagtgaaggaaagcaacttcagaaatgaattattttctttgctttattatttttaccaagacagagaagtattgtattgagagataatctattttcataatcaatatgtgcctaaattatatttaaatcatttcactctgtactatattttcaggaattacagaatgtggtattcattcacttaaaggtacctctgtagaaataacctaaaactgcagaaggatctgaaagatctaaacatggtgtgcttagaaactgcagattttagatctaatgtatactgcattaataaatgatataaagtgtttgttgaaaaaaaaaaaaaaaaaaaaa

SEQ ID NO: 116 - DNA, 2067 bp, Homo sapiens
ctacggcggccgcgcgctccaggccggtcgctccaccccccggctcccgggactgtggactccacgaccctgtcctcggccctgtccgcgccgaagcagcccgggactgcgcagcgccccgcgtgccgacatgggaaagtctctttctcatttgcctttgcattcaagcaaagaagatgcttatgatggagtcacatctgaaaacatgaggaatggactggttaatagtgaagtccataatgaagatggaagaaatggagatgtctctcagtttccatatgtggaatttacaggaagagatagtgtcacctgccctacttgtcagggaacaggaagaattcctagggggcaagaaaaccaactggtggcattgattccatatagtgatcagagattaaggccaagaagaacaaagctgtatgtgatggcttctgtgtttgtctgtctactcctttctggattggctgtgtttttccttttccctcgctctatcgacgtgaaatacattggtgtaaaatcagcctatgtcagttatgatgttcagaagcgtacaatttatttaaatatcacaaacacactaaatataacaaacaataactattactctgtcgaagttgaaaacatcactgcccaagttcaattttcaaaaacagttattggaaaggcacgcttaaacaacataagcattattggtccacttgatatgaaacaaattgattacacagtacctaccgttatagcagaggaaatgagttatatgtatgatttctgtactctgatatccatcaaagtgcataacatagtactcatgatgcaagttactgtgacaacaacatactttggccactctgaacagatatcccaggagaggtatcagtatgtcgactgtggaagaaacacaacttatcagttggggcagtctgaatatttaaatgtacttcagccacaacagtaaaaactggaagagatggatttaaagaagaaatatctattgatatttcctatactctcaatgaagaggtatttcctaataggagaccttaaattgaacaaacctaaagttcacacttctaagagtacagttaaaagtatgtggacctgcagttcttgtaactctccactctgtgttaatgatatatttgtactaggatcttttacttgaatctaaatttactggttgatttccttctccagcctatcccctacagggaaaagctgatacttcccctatagtacaataaataattatttaaaagtcatagctccagtcactactgaaaacataattttggtgataaacataatttgagaaacttaatttctgaatgtttttatagaaaattactgaaaatctattactcatggaagacttttaaagaataaccttttttcctgttttataaattcccattgttatatgatagtatttcagctacacaatattttagcttttagctagacatttataggttttcatttgttgaaatggtaatcatctgcatgtttttgtcacttatttcaggttagtgattgcctaacacttataagccaaaataatctttgcaaaattccatacctaaaattttgaaagcccctaatgttttcacacatctttctgtattagttatagttttgtgaaatctttgtgtgatcttcaaacattatcatttaatgtacaatactgtaaataaactgtgcatggcttttatacagctttagtaaatgtcaaataaagtggtacagactcattacaacaagtttctcataaaaatacaataaataggaaaatgaaattcagaaacccatagactgggaataggttccagttacagcttggatctggcataaaataaatttgaaataaaatattttgatgctccatttttttatgttgcttttcatactaaagaatggtgtagacttgttttgcaactgttaggtacccagttatcaattttatcaatgttttagaggaggaaattatttttttggtagaaattgttcaagaaatccttaattgaatgtcattaaatgatggtggccaaaataaaacctatttagaaattt

SEQ ID NO: 117 - DNA, 2924 bp, Homo sapiens
gacgtgttcgctttgcgtttgccttctgcgtgattgtaagtttcccgaggcttccccagccatgcggaactatgattctgggcctcccccatctactgtcattaaccaaaatgaaacatttgccaacataatttttaaacctactgtagtacaacaagccaggattgcccagaatggaattttgggagactttattattagatatgacgtcaatagagaacagagcattggggacatccaggttctaaatggctattttgtgcactactttgctcctaaagaccttcctcctttacccaagaatgtggtattcgtgcttgacagcagtgcttctatggtgggaaccaaactccggcagaccaaggatgccctcttcacaattctccatgacctccgaccccaggaccgtttcagtatcattggattttccaaccggatcaaagtatggaaggaccacttgatatcagtcactccagacagcatcagggatgggaaagtgtacattcaccatatgtcacccactggaggcacagacatcaacggggccctgcagagggccatcaggctcctcaacaagtacgtggcccacagtggcattggagaccggagcgtgtccctcatcgtcttcctgacggatgggaagcccacggtcggggagacgcacaccctcaagatcctcaacaacacccgagaggccgcccgaggccaagtctgcatcttcaccattggcatcggcaacgacgtggacttcaggctgctggagaaactgtcgctggagaactgtggcctcacacggcgcgtgcacgaggaggaggacgcaggctcgcagctcatcgggttctacgatgaaatcaggactccgctcctctctgacatccgcatcgattatccccccagctcagtggtgcaggccaccaagaccctgttccccaactacttcaacggctcggagatcatcattgcggggaagctggtggacaggaagctggatcacctgcacgtggaggtcaccgccagcaacagtaagaaattcatcatcctgaagacagatgtgcctgtgcggcctcagaaggcagggaaagatgtcacaggaagccccaggcctggaggcgatggagagggggacaccaaccacatcgagcgtctctggagctacctcaccacaaaggagctgctgagctcctggctgcaaagtgacgatgaaccggagaaggagcggctgcggcagcgggcccaggccctggctgtgagctaccgcttcctcactcccttcacctccatgaagctgagggggccggtcccacgcatggatggcctggaggaggcccacggcatgtcggctgccatgggacccgaaccggtggtgcagagcgtgcgaggagctggcacgcagccaggacctttgctcaagaagccataccagccaagaattaaaatctctaaaacatcagtggatggtgatccccactttgttgtggatttccccctgagcagactcaccgtgtgcttcaacattgatgggcagcccggggacatcctcaggctggtctctgatcacagggactctggtgtcacagtgaacggagagttaattggggcacccgcccctccaaatggccacaagaaacagcgcacttacttgcgcactatcaccatcctcatcaacaagccagagagatcttatctcgagatcacaccgagcagagtcatcttggatggtggggacagactggtgctcccctgcaaccagagtgtggtggtggggagctgggggctggaggtgtccgtgtctgccaacgccaatgtcaccgtcaccatccagggctccatagcctttgtcatcctcatccacctctacaaaaagccggcgcccttccagcgacaccacctgggtttctacattgccaacagcgagggcctttccagcaactgccacggactgctgggtcagttcctgaatcaggatgccagactcacagaagaccctgcagggcccagccagaacctcactcaccctctgctccttcaggtgggagaggggcctgaggccgtcctaacagtgaaaggccaccaagtcccagtggtctggaagcaaaggaagatttacaacggggaagagcagatagactgctggtttgccaggaacaatgccgccaaactgattgacggggagtacaaggattacctggcatcccatccatttgacacagggatgacacttggccagggaatgtccagggagctctgaagctggcagccttaaagatgcaagtgcatgaaggacagtgatgtggggaggccgtggggcagctcttttcatggcttgtacacgcctcagctcctggcaattagctggactccatgacccacccctggtgcagcatagatccgacgtctgtctgggcgaagggtaggggtgggtaggggcgggaagcctgagtgcaaatgtcatttccctctactgcctcttcctgcctctccccaccctgcccacatccacagaggggagagaagggtcatagctaaatgcaacaaagtctgtatcttgtcccaacctgcttttctgttctgttagcatatcataaagtaagcctttctggtgaaggaaggttgctatgaaactttttttcttggtggaaatggccaagtttaggcactctgctttttgccttacactaatgcttagaaagctgtcttttcagtggtgttgcagcccccagatgtgtggccaacctctgctgcaaaggaatctcttgctgagtccaggccaccaatcaggcaaatagcccatacatttgatcgttgtaaaccatgaagtcttttcttgcaagacgtttttcttctgctgtggtatcttgcccttaaaaattagttttcattaaaaagaaatttgattgaaaatagaaaaaaaaaaaaaaaaaaaa

SEQ ID NO: 118 - DNA, 2338 bp, Homo sapiens
aaaaaatgctgaactgctctttggaagtcgccggtgctgttgtagttggagtctgttcacgggcctgagcttcgaggccaggctcccgggtgtcgttaatgttcggggccgccgggcgccaaccgatcggagctccagcagccgggaacagctggcatttcagtagaaccatggaggagctggttcatgaccttgtctcagcattggaagagagctcagagcaagctcgaggtggatttgctgaaacaggagaccattctcgaagtatatcttgccctctgaaacgccaggcaaggaaaaggagagggagaaaacggaggtcgtataatgtgcatcacccgtgggagactggtcactgcttaagtgaaggctctgattctagtttagaagaaccaagcaaggactatagagagaatcacaataataataaaaaagatcacagtgactctgatgaccaaatgttagtagcaaagcgcaggccgtcatcaaacttaaataataatgttcgagggaaaagacctctatggcatgagtctgattttgctgtggacaatgttgggaatagaactctgcgcaggaggagaaaggtaaaacgcatggcagtagatctcccacaggacatctctaacaaacggacaatgacccagccacctgagggttgtagagatcaggacatggacagtgatagagcctaccagtatcaagaatttaccaagaacaaagtcaaaaaaagaaagttgaaaataatcagacaaggaccaaaaatccaagatgaaggagtagttttagaaagtgaggaaacgaaccagaccaataaggacaaaatggaatgtgaagagcaaaaagtctcagatgagctcatgagtgaaagtgattccagcagtctcagcagcactgatgctggattgtttaccaatgatgagggaagacaaggtgatgatgaacagagtgactggttctacgaaaaggaatcaggtggagcatgtggtatcactggagttgtgccctggtgggaaaaggaagatcctactgagctagacaaaaatgtaccagatcctgtctttgaaagtatcttaactggttcttttccccttatgtcacacccaagcagaagaggtttccaagctagactcagtcgccttcatggaatgtcttcaaagaatattaaaaaatctggagggactccaacttcaatggtacccattcctggcccagtgggtaacaagagaatggttcatttttccccggattctcatcaccatgaccattggtttagccctggggctaggacagagcatgaccagcatcagcttctgagagataatcgagctgaaagaggacacaagaaaaattgttctgtgagaacagccagcaggcaaacaagcatgcatttaggatccttatgcacgggagatatcaaacggagaagaaaagctgcacctttgcctggacctactactgcaggatttgtaggtgaaaatgcccagccaatcctagaaaataatattggaaaccgaatgcttcagaatatgggctggacgcctgggtcaggccttggacgagatggcaaggggatctctgagccaattcaagccatgcagaggccaaagggattaggacttggatttcctctaccaaaaagtacttccgcaactactacccccaatgcaggaaaatccgcctaagaaaagcaaagaagaaatgttttacagactttattcactatgtcccattgttctaaaatgataacatgacttctgtttttgaagcaaaaatctacattgcctcaaacacatcactctagcttccttactgcatacagtcctgccatagtgagagaaatgggatttcatcacaattcatggtgctaaaatgaaaacctctgcactttaatttttttcagtaatttccagctatttctaggtataaagagcagctcgtttctcttatttattttagtctcatgtgtcaatactttccgatgctttgcttaattcatgtatgtgtgcagtgctgcaatgcccagacaaacgtgagcacacccaccagtttctaaaatggaatagacaggaaaagattgtgttttatatcatccctatctattgtaacccaaaagacctaccatcgcatcagtgaagtccgaacacatctttgtttgaaaggcttgtcaatttcatattccttgaattggcttcttggtgaggattttctgacagagtgatacccatcaattttctatccttagacaatgtagtgtgaagttcacagttgacaaacaacaattaatgtttcccttggatgttttgacaaaaataaacctcatcgttgttatcaccag

SEQ ID NO: 119 - DNA, 5533 bp, Homo sapiens
cttgactcaatcctgcaagcaagtgtgtgtgtgtccccatcccccgccccgttaacttcatagcaaataacaaatacccataaagtcccagtcgcgcagcccctccccgcgggcagcgcactatgctgctcgggtgggcgtccctgctgctgtgcgcgttccgcctgcccctggccgcggtcggccccgccgcgacacctgcccaggataaagccgggcagcctccgactgctgcagcagccgcccagccccgccggcggcagggggaggaggtgcaggagcgagccgagcctcccggccacccgcaccccctggcgcagcggcgcaggagcaaggggctggtgcagaacatcgaccaactctactccggcggcggcaaggtgggctacctcgtctacgcgggcggccggaggttcctcttggacctggagcgagatggttcggtgggcattgctggcttcgtgcccgcaggaggcgggacgagtgcgccctggcgccaccggagccactgcttctatcggggcacagtggacgctagtccccgctctctggctgtctttgacctctgtgggggtctcgacggcttcttcgcggtcaagcacgcgcgctacaccctaaagccactgctgcgcggaccctgggcggaggaagaaaaggggcgcgtgtacggggatgggtccgcacggatcctgcacgtctacacccgcgagggcttcagcttcgaggccctgccgccgcgcgccagctgcgaaacccccgcgtccacaccggaggcccacgagcatgctccggcgcacagcaacccgagcggacgcgcagcactggcctcgcagctcttggaccagtccgctctctcgcccgctgggggctcaggaccgcagacgtggtggcggcggcggcgccgctccatctcccgggcccgccaggtggagctgcttctggtggctgacgcgtccatggcgcggttgtatggccggggcctgcagcattacctgctgaccctggcctccatcgccaataggctgtacagccatgctagcatcgagaaccacatccgcctggccgtggtgaaggtggtggtgctaggcgacaaggacaagagcctggaagtgagcaagaacgctgccaccacactcaagaacttttgcaagtggcagcaccaacacaaccagctgggagatgaccatgaggagcactacgatgcagctatcctgtttactcgggaggatttatgtgggcatcattcatgtgacaccctgggaatggcagacgttgggaccatatgttctccagagcgcagctgtgctgtgattgaagacgatggcctccacgcagccttcactgtggctcacgaaatcggacatttacttggcctctcccatgacgattccaaattctgtgaagagacctttggttccacagaagataagcgcttaatgtcttccatccttaccagcattgatgcatctaagccctggtccaaatgcacttcagccaccatcacagaattcctggatgatggccatggtaactgtttgctggacctaccacgaaagcagatcctgggccccgaagaactcccaggacagacctacgatgccacccagcagtgcaacctgacattcgggcctgagtactccgtgtgtcccggcatggatgtctgtgctcgcctgtggtgtgctgtggtacgccagggccagatggtctgtctgaccaagaagctgcctgcggtggaagggacgccttgtggaaaggggagaatctgcctgcagggcaaatgtgtggacaaaaccaagaaaaaatattattcaacgtcaagccatggcaactggggatcttggggatcctggggccagtgttctcgctcatgtggaggaggagtgcagtttgcctatcgtcactgtaataaccctgctcccagaaacaacggacgctactgcacagggaagagggccatctaccgctcctgcagtctcatgccctgcccacccaatggtaaatcatttcgtcatgaacagtgtgaggccaaaaatggctatcagtctgatgcaaaaggagtcaaaacttttgtggaatgggttcccaaatatgcaggtgtcctgccagcggatgtgtgcaagctgacctgcagagccaagggcactggctactatgtggtattttctccaaaggtgaccgatggcactgaatgtaggccgtacagtaattccgtctgcgtccgggggaagtgtgtgagaactggctgtgacggcatcattggctcaaagctgcagtatgacaagtgcggagtatgtggaggagacaactccagctgtacaaagattgttggaacctttaataagaaaagtaagggttacactgacgtggtgaggattcctgaaggggcaacccacataaaagttcgacagttcaaagccaaagaccagactagattcactgcctatttagccctgaaaaagaaaaacggtgagtaccttatcaatggaaagtacatgatctccacttcagagactatcattgacatcaatggaacagtcatgaactatagcggttggagccacagggatgacttcctgcatggcatgggctactctgccacgaaggaaattctaatagtgcagattcttgcaacagaccccactaaaccattagatgtccgttatagcttttttgttcccaagaagtccactccaaaagtaaactctgtcactagtcatggcagcaataaagtgggatcacacacttcgcagccgcagtgggtcacgggcccatggctcgcctgctctaggacctgtgacacaggttggcacaccagaacggtgcagtgccaggatggaaaccggaagttagcaaaaggatgtcctctctcccaaaggccttctgcgtttaagcaatgcttgttgaagaaatgttagcctgtggttatgatcttatgcacaaagataactggaggattcagcaccgatgcagtcgtggtgaacaggaggtctacctaacgcacagaaagtcatgcttcagtgacattgtcaacaggagtccaattatgggcagaatctgctctctgtgaccaaaagaggatgtgcactgcttcacgtgacagtggtgaccttgcaatatagaaaaacttgggagttattgaacatcccctgggattacaagaaacactgatgaatgtaaaatcaggggacatttgaagatggcagaactgtctcccccttgtcacctacctctgatagaatgtctttaatggtatcataatcattttcacccataatacacagtagcttcttcttactgtttgtaaatacattctcccttggtatgtcactttatatcccctggttctattaaaatatccatatatatttctataaaaaaagtgtttgaccaaagtaggtctgcagctatttcaacttccttccgtttccagaaagagctgtggatattttactggaaattaagaacttgctgctgttttaataagatgtagtatattttctgactacaggagataaaatttcagtcaaaaaaccattttgacagcaagtatcttctgagaaattttgaaaagtaaatagatctcagtgtatctagtcacttaaatacatacacgggttcatttacttaaaacctttgactgcctgtatttttttcaggtagctagccaaattaatgcataatttcagatgtagaagtagggtttgcgtgtgtgtgtgtgatcatactcaagagtctaaaaactagtttccttgtgttggaaatttaaaaggaaaaaaatcgtatttcactgtgttttcaatttatattttcacaactactttctctctccagagctttcatctgatatctcacaatgtatgatatacgtacaaaacacacagcaagttttctatcatgtccaacacattcaacactggtatacctcctaccagcaagcctttaaaatgcgtttgtgtttgcttatttgttttgttcaagggttcagtaagacctacaatgttttgtatttcttgacttattttattagaaacattaaagatcacttggtagttagccacattgagaagtggttatcattgttaatgtggttaatgccaaaaagtggttaatattaataagactgtttccacaccataggcaataatttcttaatttaaaaaatctaagtatattcctattgtactaaatatttttcccaactggaaagcacttgattgtacccgtaagtgtttgagtgatgacatgtgatgattttcagaaagttgttgtttttgtttccatagcctgtttaagtaggttgtaagtttgaatagttagacatggaaattattttataagcacacacctaaagatatctttttagatgataaaatgtacacccccccatcaccaacctcacaacttagaaaatctaagttgtttgatttcattgggatttcttttgttgtgaaacactgcaaagccaatttttctttataaaaattcatagtaatcctgccaaatgtgcctattgttaaagatttgcatgtgaagatcttagggaaccactgtttgagttctacaagctcatgagagtttatttttattataagatgtttttaatataaaagaattatgtaactgatcactatattacatcatttcagtgggccaggaaaatagatgtcttgctgttttcagtattttcttaagaaattgcttttaaaacaaataattgttttacaaaaccaataattatcctttgaattttcatagactgactttgctttcgacgtagaaatttttttttcttaataaattatcactttgagaaatgaggcctgtacaaggctgataacctatatgtgatggagatcacccaatgccaagggcagaaagcaaacctagttaaataggtgagaaaaaaaataataatcccagtgccatttgtctgtgcaaagagaattaggagagaggttaatgttacttttttccattttggaaataattttaatcaagtaactcaaatgtgacaaaatttatttttattttttgtggttatattcccaacaacattaaaaaatactcgaggcataaatgtagttgtctcctactctgcttctcttactatactcatacatttttaatatggtttatcaatgattcatgtttccctcaaatagtgatggtttacacctgtcatggaaacaatcctagagagctcagagcaattaaaccactattccatgcttttaagtagttttctccacctttttcttatgagtctcactagattgactgaggaatgtatgtctaaattcctggagaagatgatatggattggaaactgaaattcagagaaatggagtgttcaatagataccacgaattgtgaacaaagggaaaattctatacaactcaatctaagtcagtccactttgacttcgtactgtctttcacctttccattgttgcatcttgaattttttaaaatgtctagaattcaggatgctaggggctacttctccaaaaaaaaaaaaaaaaaaaaaaaaaaaa

SEQ ID NO: 120 - DNA, 2871 bp, Homo sapiens
tccgcagacgccacatgcccctgcgcctggccatggtgggctgcgcctttgtgctcttcctcttcctcctgcatagggatgtgagcagcagagaggaggccacagagaagccgtggctgaagtccctggtgagccggaaggatcacgtcctggacctcatgctggaggccatgaacaaccttagagattcaatgcccaagctccaaatcagggctccagaagcccagcagactctgttctccataaaccagtcctgcctccctgggttctataccccagctgaactgaagcccttctgggaacggccaccacaggaccccaatgcccctggggcagatggaaaagcatttcagaagagcaagtggacccccctggagacccaggaaaaggaagaaggctataagaagcactgtttcaatgcctttgccagcgaccggatctccctgcagaggtccctggggccagacacccgaccacctgagtgtgtggaccagaagttccggcgctgccccccactggccaccaccagcgtgatcattgtgttccacaacgaagcctggtccacactgctgcgaacagtgtacagcgtcctacacaccacccctgccatcttgctcaaggagatcatactggtggatgatgccagcacagaggagcacctaaaggagaagctggagcagtacgtgaagcagctgcaggtggtgagggtggtgcggcaggaggagcggaaggggttgatcaccgcccggctgctgggggccagcgtggcacaggcggaggtgctcacgttcctggatgcccactgtgagtgcttccacggctggctggagcccctcctggctcgaatcgctgaggacaagacagtggtggtgagcccagacatcgtcaccatcgaccttaatacttttgagttcgccaagcccgtccagaggggcagagtccatagccgaggcaactttgactggagcctgaccttcggctgggaaacacttcctccacatgagaagcagaggcgcaaggatgaaacataccccatcaaatccccgacgtttgctggtggcctcttctccatccccaagtcctactttgagcacatcggtacctatgataatcagatggagatctggggaggggagaacgtggaaatgtccttccgggtgtggcagtgtgggggccagctggagatcatcccctgctctgtcgtaggccatgtgttccggaccaagagcccccacaccttccccaagggcactagtgtcattgctcgcaatcaagtgcgcctggcagaggtctggatggacagctacaagaagattttctataggagaaatctgcaggcagcaaagatggcccaagagaaatccttcggtgacatttcggaacgactgcagctgagggaacaactgcactgtcacaacttttcctggtacctgcacaatgtctacccagagatgtttgttcctgacctgacgcccaccttctatggtgccatcaagaacctcggcaccaaccaatgcctggatgtgggtgagaacaaccgcggggggaagcccctcatcatgtactcctgccacggccttggcggcaaccagtactttgagtacacaactcagagggaccttcgccacaacatcgcaaagcagctgtgtctacatgtcagcaagggtgctctgggccttgggagctgtcacttcactggcaagaatagccaggtccccaaggacgaggaatgggaattggcccaggatcagctcatcaggaactcaggatctggtacctgcctgacatcccaggacaaaaagccagccatggccccctgcaatcccagtgacccccatcagttgtggctctttgtctaggacccagatcatccccagagagagcccccacaagctcctcaggaaacaggattgctgatgtctgggaacctgatcaccagcttctctggaggccgtaaagatggatttctaaacccactgggtggcaaggcaggaccttcctaatccttgcaacaacattgggcccattttctttccttcacaccgatggaagagaccattaggacatatatttagcctagcgttttcctgttctagaaatagaggctcccaaagtagggaaggcagctgggggagggttcagggcagcaatgctgagttcaagaaaagtacttcaggctgggcacagtggctcatgcctgaaatcctagcactttgggaagacaatgtgggagaatggcttgagcccaggagttcaagaccggcctgagcaacatagtgaggatcccatctctacgcccaccctccccccggcaaaaaaaaaagctgggtatggtggcttatgcctgtagtcgcagctactcagaaggctgaggtgggaggattgcttgttccccggaggttgaagctacagtgagccttgattgtgtcactgcactccagcctgggcaacaggtaagactctgtctcaaaaaaaaaacaaaaaagaagaagaaaagtacttctacagccatgtcctattccttgatcatccaaagcacctgcagagtccagtgaaatgatatattctggctgggcacagtggctcacacctgtaatcctagcactttgggaggccaaggcaggtggatcacctgaggtcagaagtttgaaaccagcctggactacatggtgaaactccatctctactaaaagtacaaaaattagctgggcatgatggcacgcacctgcagtcccagctacttgggaggctgaggcaggagaatcactcgaacccaggaggcagaggttgcagtgagccaagacagcaccattgcaccccagcctgagcaacaagagcgaaactccatctcaggaaaaaaaaaaaaaaaaa

SEQ ID NO: 121 - DNA, 4629 bp, Homo sapiens
gggggtgaaaaagggggtttgcagaggctgccctggggctggtgctgaaagaagagcccacagctgacttcatggtgctacaataacctcagaatctacttttcactctcaggagaacccacagtctaatatttagacatgatggcaaactgggcggaagcaagacctctcctcattcttattgttttattagggcaatttgtctcaataaaagcccaggaagaagacgaggatgaaggatatggtgaagaaatagcctgcactcagaatggccagatgtacttaaacagggacatttggaaacctgccccttgtcagatctgtgtctgtgacaatggagccattctctgtgacaagatagaatgccaggatgtgctggactgtgccgaccctgtaacgccccctggggaatgctgtcctgtctgttcacaaacacctggaggtggcaatacaaattttggtagaggaagaaagggacaaaagggagaaccaggattagtgcctgttgtaacaggcatacgtggtcgtccaggaccggcaggacctccaggatcacagggaccaagaggagagcgagggccaaaaggaagacctggccctcgtggacctcagggaattgatggagaaccaggtgttcctggtcaacctggtgctccaggacctcctggacatccgtcccacccaggacccgatggcttgagcaggccgttttcagctcaaatggctgggttggatgaaaaatctggacttgggagtcaagtaggactaatgcctggctctgtgggtcctgttggcccaaggggaccacagggtttacaaggacagcaaggtggtgcaggacctacaggacctcctggtgaacctggtgatcctggaccaatgggtccgattggttcacgtggaccagagggccctcctggtaaacctggggaagatggtgaacctggcagaaatggaaatcctggtgaagtgggatttgcaggatctccgggagctcgtggatttcctggggctcctggtcttccaggtctgaagggtcaccgaggacacaaaggtcttgaaggccctaaaggtgaagttggagcacctggttccaagggtgaagctggccccactggtccaatgggtgccatgggtcctctgggtccgaggggaatgccaggagagagagggagacttgggccacagggtgctcctggacaacgaggtgcacatggtatgcctggaaaacctggaccaatgggtcctcttgggataccaggctcttctggttttccaggaaatcctggaatgaagggagaagcaggtcctacaggggcgcgaggccctgaaggtcctcaggggcagagaggtgaaactgggcccccaggtccagttggctctccaggtcttcctggtgcaataggaactgatggtactcctggtcccaaaggcccaacgggctctccgggtacctctggtcctcctggctcagcagggcctcctggatctccaggacctcagggtagcactggtcctcaggggaattcgggccttccgggtgatccaggtttcaaaggagaagctggcccaaaaggggaaccagggccacatggtattcagggtccgataggcccacccggtgaagaaggcaaaagaggtcccagaggtgacccaggaacacttggtcctccagggccagtgggagaaaggggtgctcctggcaatcgtggttttccaggctctgatggtttacctgggccaaagggtgctcaaggagaacggggtcctgtaggttcttcaggacccaaaggaagccagggggatccaggacgtccaggggaacctgggcttccaggtgctcggggtttgacaggaaatcctggtgttcaaggtcctgaaggaaaacttggacctttgggtgcgccaggggaagatggccgtccaggtcctccaggctccataggaatcaaagggcagcccgggaccatgggccttccaggccccaaaggtagcaatggtgaccctgggaaacctggagaagcaggaaatcctggagttcctgggcaaaggggagctcctggaaaagatggtaaagttggtccttatggtcctcctgggccgccgggtctacgtggtgaaagaggagaacaaggacctccagggcccacaggttttcaggggcatcctggtcctccaggtcctcctggagaaggtggaaaaccaggtgatcaaggtgttcctggaggtcccggagcagttggcccgttaggacctagaggagaacgaggaaatcctggggaaagaggagaacctgggataactggactccctggtgagaagggaatggctggaggacatggtcctgatggcccaaaaggcagtccaggtccatctgggacccctggagatacaggcccaccaggtcttcaaggtatgccgggagaaagaggaattgcaggaactcctggccccaagggtgacagaggtggcataggagaaaaaggtgctgaaggcacagctggaaatgatggtgcaggaggtcttccaggtcctttgggccctccaggtccggcaggcctactgggagaaaagggtgaacctggtcctcgaggtttagttggtcctcctggctcccggggcaatcctggttctcgaggtgaaaatgggccaactggagctgttggttttgccggaccccaggggtctgacggacagcctggagtaaaaggtgaacctggagagccaggacagaagggagatgctggttctcctggaccacaaggtttagcaggatcccctggccctcatggtcctaatggtgttcctggactaaaaggtggtcgaggaacccaaggtccgcctggtgctacaggatttcctggttctgcgggcagagttggacctccaggccctgctggagctccaggacctgcgggacccctaggggaacccgggaaggagggacctccaggtcctcgtggggaccctggctctcatgggcgtgtgggagtccgaggaccagctggcccccctggtggcccaggagacaaaggggacccaggagaagatgggcaacctggtccagatggcccccctggtccagctggaacgaccgggcagagaggaattgttggcatgcctgggcaacgtggagagagaggcatgcccggcctaccaggcccagcgggaacaccaggaaaagtaggaccaactggtgcaacaggagataaaggtccacctggacctgtggggcccccaggctccaatggtcctgtaggggaacctggaccagaaggtccagctggcaatgatggtaccccaggacgggatggtgctgttggagaacgtggtgatcgtggagaccctgggcctgcaggtctgccaggctctcagggtgcccctggaactcctggccctgtgggtgctccaggagatgcaggacaaagaggagatccgggttctcggggtcctataggacacctgggtcgagctggaaaacgtggattacctggaccccaaggacctcgtggtgacaaaggtgatcatggagaccgaggcgacagaggtcagaagggccacagaggctttactggtcttcagggtcttcctggccctcctggtccaaatggtgaacaaggaagtgctggaatccctggaccatttggcccaagaggtcctccaggcccagttggtccttcaggtaaagaaggaaaccctgggccacttgggccattgggacctccaggtgtacgaggcagtgtaggagaagcaggacctgagggccctcctggtgagcctggcccacctggccctccgggtccccctggccaccttacagctgctcttggggatatcatggggcactatgatgaaagcatgccagatccacttcctgagtttactgaagatcaggcggctcctgatgacaaaaacaaaacggacccaggggttcatgctaccctgaagtcactcagtagtcagattgaaaccatgcgcagccccgatggctcgaaaaagcacccagcccgcacgtgtgatgacctaaagctttgccattccgcaaagcagagtggtgaatactggattgatcctaaccaaggatctgttgaagatgccatcaaagtttactgcaacatggaaacaggagaaacatgtatttcagcaaacccatccagtgtaccacgtaaaacctggtgggccagtaaatctcctgacaataaacctgtttggtatggtcttgatatgaacagagggtctcagttcgcttatggagaccaccaatcacctaatacagccattactcagatgacttttttgcgccttttatcaaaagaagcctcccagaacatcacttacatctgtaaaaacagtgtaggatacatggacgatcaagctaagaacctcaaaaaagctgtggttctcaaaggggcaaatgacttagatatcaaagcagagggaaatattagattccggtatatcgttcttcaagacacttgctctaagcggaatggaaatgtgggcaagactgtctttgaatatagaacacagaatgtggcacgcttgcccatcatagatcttgctcctgtggatgttggcggcacagaccaggaattcggcgttgaaattgggccagtttgttttgtgtaa

SEQ ID NO: 122 - DNA, 1834 bp, Homo sapiens
acgcaagtccctttcctcccgacacgagtgcagtaaagaaaaacggttatgagcgtaaagtgacagcctcggccgatgggaatagggggaagtccgacactgagcaacgaacgcattcccgcgcctccaaaacctaggccgggggcgctggaaacccttaccggcactcggccaccgcggcagacgcttgctcctgccacgcccccccccctcccccgcatcacgtgtctgcactcgctttcctcggattcccggatgtggttgccaaaacaaaggggatttggtgatggaggctttgctagaaggaatacaaaatcgagggcatggtgggggatttttgacatcttgtgaagcagaactacaggagctcatgaaacagattgacataatggtggctcataaaaaatctgaatgggaaggacgtacacatgctctagaaacttgcttgaaaatccgtgaacaggaacttaagagtcttaggagtcagttggatgtgacacataaggaggttggaatgttgcatcagcaggtagaagaacatgaaaaaatcaagcaagagatgaccatggaatataagcaggagctgaagaaactacatgaagaattatgcatactgaagagaagctatgaaaagcttcagaaaaagcaaatgagggaattcagaggaaataccaaaaatcacagggaagatcggtctgaaattgagaggttaactgcaaaaatagaggaattccgtcagaaatcgctggactgggagaagcaacgcttgatttatcagcaacaggtatcttcactggaggcacaaaggaaggctctggctgaacaatcagagataattcaggctcagcttgtcaatcggaaacagaaattagagtctgtggaactttctagccaatcagaaattcaacacttaagcagtaaactggagcgggctaatgacactatctgtgccaatgagttggaaatagagcgcctcaccatgagggtcaatgacttggttggaaccagtatgactgtcctacaggagcagcagcaaaaagaagaaaaattgagggaatctgaaaaactattagaggctctgcaggaagaaaagagagaattgaaggcagctcttcagtctcaagaaaatctcatacatgaggccagaatacaaaaggagaagttacaagaaaaagtaaaggcaactaacactcaacatgctgtagaagctataagtttggaatctgtgagtgcaacgtgtagacagctgagccaagaactaatggaaaaatatgaagaactgaagaggatggaagcacataacaatgaatacaaagcagagattaagaagttgaaagaacagattttacagggtgaacaaagttacagttctgcactagaaggaatgaagatggaaatctcccatctaactcaggagttacatcagcgagatatcactattgcttccaccaaaggttcttcctcagacacggaaaagcgactcagagcagagatgcaaaaggcagaagacaaagcagtagagcataaggagattttggatcagctggagtcactcaaattagaaaatcgtcatctttctgaaatggtgatgaaattggaattgggtttacatgagagatggggttttaccatgttgtccagtctggttttgaacttcgggattcaagcaatccgccagcctcagcgtcccaaagtgctggaattacaagtgtgagctaccaccactggcagttaagaattttaacaatttgtcaatgaaacaagaatctcaattagagtctttatatacaatctgtactgttggaattttcaaataaatattgtaaagaaaatt

SEQ ID NO: 123 - DNA, 2671 bp, Homo sapiens
aatatgtgtgtgtctgtgtgtgtgtatatatgtatgtggcggagagggagagagtggggaaggagagcagtgttatcatacatagagaggctaaatgtgtcccatccctcactgtcagctttataaaggagtttgactccatccacagaagaatgttttataagactaggaaaacacgttgaaaactaggataaacagcaacaaaaatcaactaaatatgttgttactgttgctaaggattttctccttagaataatttaggatttttaaaaatttctgtttgccaaatgctgtagataaatggccagattcttcctatccctaggattcctttattattttttttcacagattttgagaacaagggggagagatagtatggaagattaagattccattaatcttatagaactgtgttgtcacccaaattcctgcttgtttgaacatggcatcttcatagattcaggattcactaccctctatagctggatcttgaaaattatctggccagataattttgcatctgcttggatgattgtagactgagatgtgagtggaggataaagtattagacttttgctgagtaactgccaaccaagaagtatttatcggacacttactaggtgcctaggattgtatcagagggaatatgaaatgtgtccctgccctacctagttttaacgacagaatatctattaaaggctacttagctgaagggtaagggtgacaggtctaggggaagctttgggaggtggtgtgctgtgacagaaaaagtggcagagtagggacgagagacctgcattctagccctgtttctgtcacttgctctgtacacttagacaacagcttgacctcttgagctttagtttcctcctctgcataatgagagggttagactactgaattgtatgggaaaaaaatacaaattcctgggtcctaggccatgcctgctgaatccgactgttcaggaagaggcctaggaaatctgtgagggaatccccaggggaatctcgtgaccagccaggtgtgaaatctgctaactggaagatctcaaagcttccttcactttttgtgattttgtggtcatgtaacgttactgtattattctacgtaaatgtgggtacttggatgtttatcatactgtttctctgtgtttacatactaatttgtgtaagaaatgcattttagtctgtgtacctcaacctgctgtttgtttcctagaggtgttagtagtctttaaatacaagtaagacttaagaggatatttgatgttatttacctggatattttcttccccttttatttatttagaggaaattgagattctaggagccaaaaaaatgaaaacaaaattctaaggcaaagttaaagaaaaaaattacattatttcttaccatttgctactttataatgaaaatttaaaaattatatgggaagatttttctctgggataacaaatccttgtcataaagtaagaggtctttttaaagtaggtaggctataaggcctgtaatttaaaataatactcctttctctagggtttggtgcaattctccattaatgaagataacatttgaattccccaaagcaggtgaggagtcggggaggagaaagcgatgttaaaatgaaaactcactgcaaaagaggaggcagaggaagaaggaatgtaaaccccttaaagcagatgtgtgtggggccttatgaagaccaggattctgcgggtgtcaggggattgcccctcttgacagagactagggttttagactgaggcttcctgcagggtgttcgcattgcccttctccgttccccttcagacctttctggggagaagaggtgggaggaggggagaaagactgttcatcttattctgaatcctggagcagctgaaggttttctcttgagtcaggatgcagtggtaatgcattaaccagcaagtgtggccaaggataatgaaaaagtgggaaaggaaggtcctcctcctccctgattgtagcatccagcagtctctgtagccaggttactcaagaaccacatttgatttcctggccctttgccttggcagtgatggcatttttatttcactgtgttttaaagtcttcatttatttttataacatgggttagggagaagggccacaaatggagggattgtcctttcaagcaccacagcttcagataaaattagtactttcaaatattgtccactttaacttaaaaaattctagagggattatattggagactcaactgcccttggttttagtttataaaatggcctagtactgtggaattttaattttagaaagtcttagcatcagatcataaacattcattaaaagaactcacatcccatctgaaacttcccaggggagttgggattcttagtagattggtagaaaggggctcattttctactgcatttcccatttttggtatcttgttcagcatgttttatttttatttcttgtctgcagaacatcctatatttatgagaacattctttaagaagaccaccacatagaataccccttcctatcagctcgctctgatttagccttaattttgttaaattttttagagatgaatgaagtgctgctgtggaaagaaatgtacatatactatttctgtatcattaaaattacatttttatggttcaaaaaaaaaaaaaaaaa

SEQ ID NO: 124 - DNA, 594 bp, Homo sapiens
ttttttttctagtgaaaataatctttatttgacatttagataacaggattgtggggaatattcttattaagaactttggtacaatgtactacatgtggaacagtcaggaactgcctaggtccacaaagaaccatttactcagatagtctaactgtaaacaaataaataagctgcctaaggaaacctcagcaatttaaaatcatttatataatttatagctaaaattttttaaagttgtatttcataatagagcttactcttatgttaaagaatggcacaaaattaagctaaccagcttgaattacattttctttacttccagaattgtcctggaaaaagcagtaaattcgacctctcctcagctacttgctcttcatagaaactggcctcagtcaaatgcacaaaggctcttcctcctggaaaccagtactgtgagcctcaccacccagggcttttagccagcactcacagtcagtctcctacttcagttggcacagactggataatgagctcctgggatggaaaagcaggccacttttgggttttcttgcccaaagcctgcttttgaggtttgatttttttaaaaaagggaat

SEQ ID NO: 125 - DNA, 2722 bp, Homo sapiens
gggagtaggtcagacagggttttcactgtctagatttagctggttagattttcctctaaaatcttaagcagatgctgaatccataaagccaaggagtgctgagggctggagtgggtgggccctccctcccacagccccagggagatacatctggactcctgggaatctggattaagaaagttgggatgaaagaggaggactgctcaggccagttgtgagccagggagaatgttccagtctggttttggtctggtggctcctagaaagggatgtggcccagaagtgggactcaaacagagagatgaagtaggggaggggagtcctccacgggcatctctctcctggcggctggatagctttaccctagggtggggccagccctgacaccctcatcccctcctcagcccagcagcctctagagcagcgtggtgctctcttgatggccaggaatccagaatctgcccttccccaaccttggtttctccttctgtaaagcagagtgatggctgagaagtcctctctagctgcagaagcctgagcttcccggtgtcagtcagctctgcaacgtgggagccttggaggcgggtggcctggctgtgcttcatatgcccaggagtggagaaggaggctgagaagctggtttcccagctctgatctccacaggcacctcctataaccctcctctcacccaccccgctacggtctgagagatctgaaataacctttcccagtgggcagggttgccagggttgaggggacagcacataccacccccacccaacctgttcgaggggccctgcatggcacgggatgagtccctgccctgtgcagctgcctggcagtggctgggacaaggatcttgcagccagcacagaggcctcttcaaaggcctctccctcttggcactccaggcaaggcaggtgcccgcttccccaacacctccaggcagtgaccctagggcatgccccagcaggtctccgagcagccactgggacccgtctcagcacatcctggcctttgaaagtctgatatcctgagaggagggcaggttttagggccgcagttccagccagcgtccccagcctggcttccctgccatggactcagtagctcgtggggcttcttaccacccaccagccccgctggggtgcggcctggctgtgggcaaaggaggacttgcctggagatttgagagaagattccttctaccagggctgctgaggggccaggcctgcatcaggggctaggctctggctgggcccggaggctgagactaaggctttcgaccctggtgcctccatgtggatgctgcctcagacaaaggcagtgagccttccctgccaaagtgcccatcccatgggctcggcctcactggtcactgttagcccatgaacacgtgtgggcctcggtcacgtggctttgagggcagtctgaccaggctagaccacacgtgccgtgacagggggtgccattcccctcgcaggctctaatgtgcccacatgtagcctggcagtccaaagaccaagaatcaacttgcaaatctgccattaaactgctgtgcgacttcaggcatatcactgccttctctgggcttcagtgtccttttcatacctagaagtctgcggtctgaggctctttgggttcagacacactgttctaggcttctgtaggggaccttgtgatctgccgtgcccctcctccctgttcttttctgtcctccccaccccaccctcagaagctgcttgctctgcccccaggacaggagcttgacggatgaagtgcagccagccacccaggtgccatttccagtctgacttccagaaatgtgcaccatgtcctagagcacagacccattggctggagcctcctgggagggttcaaaccatcagctctatgagaaatgcccagaaaggctttgccgactccatccgtctgtggaggctgcctgcctccggggtgggatgggtggtttctcctccaattcagacccaagaggtagcccccgagggcatgtacctggtgggaagcagctcaggtacccttgggggttgcagggcccttacgcaggtatttctctctctctcctctctggggtgcgtgtgtgcgtgcgcgtgtgcgtgcctatgcttttctctgtgggcacatcaggatgcccctcggagagcatgtgcacgtgtccccacctgagcgagcgtgtgtgtgtgctcctctgcgtcccaggtttggacgtctagggtttggtgtgcctgtcttctgccctccctgagcccacagggtcagtcaatgtatcttctacgtgcctctccctctgccttctctcacagtgcccccggctccagagctcaggggtaggggttctcctgagggtgcaggggatccttctcatctcctggaccctccagggcactctggtccctattccccagctcctaggcagctgagccgggtcccttaggggaggtgaccaggagctttggtgcagggagctcttggtggggcaaagggctggacccctgccaggtctgtggacatggttatatgcccgggagaggggggtgcagggccccagggatggcccccaatcccacctctgtttattctgtaaactgcaacctataaataacctttagcattcctattgtaacaaaattaatttttatgaaataaattatatttcctagtctaataaaatccgggttgcatttaaaaaaaaaaaaaaaaa

SEQ ID NO: 126 - DNA, 413 bp, Homo sapiens
  misc_feature (39)..(39): n is a, c, g, or t
  misc_feature (73)..(75): n is a, c, g, or t
  misc_feature (164)..(165): n is a, c, g, or t
  misc_feature (199)..(201): n is a, c, g, or t
  misc_feature (208)..(223): n is a, c, g, or t
  misc_feature (256)..(256): n is a, c, g, or t
  misc_feature (258)..(258): n is a, c, g, or t
  misc_feature (276)..(276): n is a, c, g, or t
  misc_feature (288)..(288): n is a, c, g, or t
  misc_feature (352)..(352): n is a, c, g, or t
gttgaggggactgacggggccaccaccgccccgccctcnagcgcctcctcccagggtactgcgcctcctgttnnnagggatcacacctgggtgatggcccaagccctcccggaaccaaagggtgaggctcagacggcggctttctggctgctgtgctgcctccnnggctccagccctcccctgcccccagcccgtcccnnncccaggnnnnnnnnnnnnnnnnggggctgggagtccccatcagaggcagtgaggngngccccggccctgggacangcagctgccttntggtctgcatgacactaagacgcttgtccacagcggcgacccaggcctccaagcttgcacagangcaaggccagacttttccgtcgtttattttcaataaataagcagctcagcgcaaaaaaaaa

SEQ ID NO: 127 - DNA, 3310 bp, Homo sapiens
ggcacgagggcactgagctctgccgcctggctctagccgcctgcctggcccccgccgggactcttgcccaccctcagccatggctccgatatctctgtcgtggctgctccgcttggccaccttctgccatctgactgtcctgctggctggacagcaccacggtgtgacgaaatgcaacatcacgtgcagcaagatgacatcaaagatacctgtagctttgctcatccactatcaacagaaccaggcatcatgcggcaaacgcgcaatcatcttggagacgagacagcacaggctgttctgtgccgacccgaaggagcaatgggtcaaggacgcgatgcagcatctggaccgccaggctgctgccctaactcgaaatggcggcaccttcgagaagcagatcggcgaggtgaagcccaggaccacccctgccgccgggggaatggacgagtctgtggtcctggagcccgaagccacaggcgaaagcagtagcctggagccgactccttcttcccaggaagcacagagggccctggggacctccccagagctgccgacgggcgtgactggttcctcagggaccaggctccccccgacgccaaaggctcaggatggagggcctgtgggcacggagcttttccgagtgcctcccgtctccactgccgccacgtggcagagttctgctccccaccaacctgggcccagcctctgggctgaggcaaagacctctgaggccccgtccacccaggacccctccacccaggcctccactgcgtcctccccagccccagaggagaatgctccgtctgaaggccagcgtgtgtggggtcagggacagagccccaggccagagaactctctggagcgggaggagatgggtcccgtgccagcgcacacggatgccttccaggactgggggcctggcagcatggcccacgtctctgtggtccctgtctcctcagaagggacccccagcagggagccagtggcttcaggcagctggacccctaaggctgaggaacccatccatgccaccatggacccccagaggctgggcgtccttatcactcctgtccctgacgcccaggctgccacccggaggcaggcggtggggctgctggccttccttggcctcctcttctgcctgggggtggccatgttcacctaccagagcctccagggctgccctcgaaagatggcaggagagatggcggagggccttcgctacatcccccggagctgtggtagtaattcatatgtcctggtgcccgtgtgaactcctctggcctgtgtctagttgtttgattcagacagctgcctgggatccctcatcctcatacccacccccacccaagggcctggcctgagctgggatgattggaggggggaggtgggatcctccaggtgcacaagctccaagctcccaggcattccccaggaggccagccttgaccattctccaccttccagggacagagggggtggcctcccaactcaccccagccccaaaactctcctctgctgctggctggttagaggttccctttgacgccatcccagccccaatgaacaattatttattaaatgcccagccccttctgacccatgctgccctgtgagtactacagtcctcccatctcacacatgagcatcaggccaggccctctgcccactccctgcaacctgattgtgtctcttggtcctgctgcagttgccagtcaccccggccacctgcggtgctatctcccccagccccatcctctgtacagagcccacgcccccactggtgacatgtcttttcttgcatgaggctagtgtggtgtttcctgggcactgcttccagtgaggctctgcccttggttaggsattgtgggaaggggagataagggtatctggtgactttcctctttggtctacactgtgctgagtctgaaggctgggttctgatcctagttccaccatcaagccaccaacatactcccatctgtgaaaggaaagagggaggtaaggaatacctgtccccctgacaacactcattgacctgaggcccttctctccagcccctggatgcagcctcacagtccttaccagcagagcaccttagacagtccctgccaatggactaacttgtctttggaccctgaggcccagagggcctgcargggagtgagttgatagcacagaccctgccctgtgggcccccaaatggaaatgggcagagcagagaccatccctgaaggccccgcccaggcttagtcactgagacagcccgggctctgcttcccatcacccgctaagagggagggagggctccagacacatgtccaagaagcccaggaaaggctccaggagcagccacattcctgatgcttcttcagagactcctgcaggcagccaggccacaagacccttgtggtcccaccccacacacgccagattctttcctgaggctgggctcccttcccacctctctcactccttgaaaacactgttctctgccctccaagaccttctccttcacctttgtccccaccgcagacaggaccaggggatttccatgatgttttccatgagtcccctgtttgtttctgaaagggacgctacccgggaagggggctgggacatgggaaaggggaagttgtaggcataaagtcaggggttcccttttttggctgctgaaggctcgagcatgcctggatggggctgcaccggctggcctggcccctcagggtccctggtggcagctcacctctcccttggattgtccccgacccttgccgtctacctgaggggcctcttatgggctgggttctacccaggtgctaggaacactccttcacagatgggtgcttggaggaaggaaacccagctctggtccatagagagcaaaacgctgtgctgccctgcccaccctggcctctgcactcccctgctgggtgtggcgcagcatattcaggaagctcagggccctggctcaggtggggtcactctggcagctcagagagggtgggagtgggtccaatgcactttgttctggctcttccaggctgggagagcctttcaggggtgggacaccctgtgatggggccctgcctcctttgtgaggaagccgctggggccagttggtcccccttccatggactttgttagtttctccaagcaggacatggacaaggatgatctaggaagactttggaaagagtaggaagactttggaaagacttttccaaccctcatcaccaacgtctgtgccattttgtattttactaataaaatttaaaagtcttgtgaaaaaaaaaaaaaaaaaaaaaaa

SEQ ID NO: 128 - protein, 572 aa, Homo sapiens
MSYQGKKNIPRITSDRLLIKGGKIVNDDQSFYADIYMEDGLIKQIGENLIVPGGVKTIEAHSRMVIPGGIDVHTRFQMPDQGMTSADDFFQGTKAALAGGTTMIIDHVVPEPGTSLLAAFDQWREWADSKSCCDYSLHVDISEWHKGIQEEMEALVKDHGVNSFLVYMAFKDRFQLTDCQIYEVLSVIRDIGAIAQVHAENGDIIAEEQQRILDLGITGPEGHVLSRPEEVEAEAVNRAITIANQTNCPLYITKVMSKSSAEVIAQARKKGTVVYGEPITASLGTDGSHYWSKNWAKAAAFVTSPPLSPDPTTPDFLNSLLSCGDLQVTGSAHCTFNTAQKAVGKDNFTLIPEGTNGTEERMSVIWDKAVVTGKMDENQFVAVTSTNAAKVFNLYPRKGRIAVGSDADLVIWDPDSVKTISAKTHNSSLEYNIFEGMECRGSPLVVISQGKIVLEDGTLHVTEGSGRYIPRKPFPDFVYKRIKARSRLAELRGVPRGLYDGPVCEVSVTPKTVTPASSAKTSPAKQQAPPVRNLHQSGFSLSGAQIDDNIPRRTTQRIVAPPGGRANITSLG

SEQ ID NO: 129 - protein, 409 aa, Homo sapiens
VLSQRQRDELNRAIADYLRSNGYEEAYSVFKKEAELDVNEELDKKYAGLLEKKWTSVIRLQKKVMELESKLNEAKEEFTSGGPLGQKRDPKEWIPRPPEKYALSGHRSPVTRVIFHPVFSVMVSASEDATIKVWDYETGDFERTLKGHTDSVQDISFDHSGKLLASCSADMTIKLWDFQGFECIRTMHGHDHNVSSVAIMPNGDHIVSASRDKTIKMWEVQTGYCVKTFTGHREWVRMVRPNQDGTLIASCSNDQTVRVWVVATKECKAELREHEHVVECISWAPESSYSSISEATGSETKKSGKPGPFLLSGSRDKTIKMWDVSTGMCLMTLVGHDNWVRGVLFHSGGKFILSCADDKTLRVWDYKNKRCMKTLNAHEHFVTSLDFHKTAPYVVTGSVDQTVKVWECR

SEQ ID NO: 130 - protein, 109 aa, Homo sapiens
MAVVGVSSVSRLLGRSRPQLGRPMSSGAHGEEGSARMWKTLTFFVALPGVAVSMLNVYLKSHHGEHERPEFIAYPHLRIRTKPFPWGDGNHTLFHNPHVNPLPTGYEDE

SEQ ID NO: 131 - protein, 448 aa, Homo sapiens
MAEASATGACGEAMAAAEGSSGPAGLTLGRSFSNYRPFEPQALGLSPSWRLTGFSGMKGCGCKVPQEALLKLLAGLTRPDVRPPLGRGLVGGQEEASQEAGLPAGAGPSPTFPALGIGMDSCVIPLRHGGLSLVQTTDFFYPLVEDPYMMGRIACANVLSDLYAMGITECDNMLMLLSVSQSMSEEEREKVTPLMVKGFRDAAEEGGTAVTGGQTVVNPWIIIGGVATVVCQPNEFIMPDSAVVGDVLVLTKPLGTQVAVNAHQWLDNPERWNKVKMVVSREEVELAYQEAMFNMATLNRTAAGLMHTFNAHAATDITGFGILGHSQNLAKQQRNEVSFVIHNLPIIAKMAAVSKASGRFGLLQGTSAETSGGLLICLPREQAARFCSEIKSSKYGEGHQAWIVGIVEKGNRTARIIDKPRVIEVLPRGATAAVLAPDSSNASSEPSS

SEQ ID NO: 132 - protein, 345 aa, Homo sapiens
AMVSEFLKQAWFIENEEQEYVQTVKSSKGGPGSAVSPYPTFNPSSDVAALHKAIMVKGVDEATIIDILTKRNNAQRQQIKAAYLQETGKPLDETLKKALTGHLEEVVLALLKTPAQFDADELRAAMKGLGTDEDTLIEILASRTNKEIRDINRVYREELKRDLAKDITSDTSGDFRNALLSLAKGDRSEDFGVNEDLADSDARALYEAGERRKGTDVNVFNTILTTRSYPQLRRVFQKYTKYSKHDMNKVLDLELKGDIEKCLTAIVKCATSKPAFFAEKLHQAMKGVGTRHKALIRIMVSRSEIDMNDIKAFYQKMYGISLCQAILDETKGDYEKILVALCGGN

SEQ ID NO: 133 - protein, 144 aa, Homo sapiens
MPKNKGKGGKNRRRGKNENESEKRELVFKEDGQEYAQVIKMLGNGRLEAMCFDGVKRLCHIRGKLRKKVWINTSDIILVGLRDYQDNKADVILKYNADEARSLKAYGELPEHAKINETDTFGPGDDDEIQFDDIGDDDEDIDDI

SEQ ID NO: 134 - protein, 314 aa, Homo sapiens
PGLSCRFYQHKFPEVEDVVMVNVRSIAEMGAYVSLLEYNNIEGMILLSELSRRRIRSINKLIRIGRNECVVVIRVDKEKGYIDLSKRRVSPEEAIKCEDKFTKSKTVYSILRHVAEVLEYTKDEQLESLFQRTAWVFDDKYKRPGYGAYDAFKHAVSDPSILDSLDLNEDEREVLINNINRRLTPQAVKIRADIEVACYGYEGIDAVKEALRAGLNCSTENMPIKINLIAPPRYVMTTTTLERTEGLSVLSQAMAVIKEKIEEKRGVFNVQMEPKVVTDTDETELARQMERLERENAEVDGDDDAEEMEAKAED

SEQ ID NO: 135 - protein, 137 aa, Homo sapiens
MMTSVGTNRARGNWEQPQNQNQTQHKQRPQATAEQIRLAQMISDHNDADFEEKVKQLIDITGKNQDECVIALHDCNGDVNRAINVLLEGNPDTHSWEMVGKKKGVSGQKDGGQTESNEEGKENRDRDRDYSRRRGGP

SEQ ID NO: 136 - protein, 327 aa, Homo sapiens
MADGELNVDSLITRLLEVRGCRPGKIVQMTEAEVRGLCIKSREIFLSQPILLELEAPLKICGDIHGQYTDLLRLFEYGGFPPEANYLFLGDYVDRGKQSLETICLLLAYKIKYPENFFLLRGNHECASINRIYGFYDECKRRFNIKLWKTFTDCFNCLPIAAIVDEKIFCCHGGLSPDLQSMEQIRRIMRPTDVPDTGLLCDLLWSDPDKDVQGWGENDRGVSFTFGADVVSKFLNRHDLDLICRAHQVVEDGYEFFAKRQLVTLFSAPNYCGEFDNAGGMMSVDETLMCSFQILKPSEKKAKYQYGGLNSGRPVTPPRTANPPKKR

SEQ ID NO: 137 - protein, 404 aa, Homo sapiens
MQRRDDPAARMSRSSGRSGSMDPSGAHPSVRQTPSRQPPLPHRSRGGGGGSRGGARASPATQPPPLLPPSATGPDATVGGPAPTPLLPPSATASVKMEPENKYLPELMAEKDSLDPSFTHAMQLLTAEIEKIQKGDSKKDDEENYLDLFSHKNMKLKERVLIPVKQYPKEEELRKGGDPKYAHLNMDLHVFIEVFGPPCEAYALMAHAMEEVKKFLVPDMMDDICQEQFLELSYLNGVPEPSRGRGVPVRGRGAAPPPPPVPRGRGVGPPRGALVRGTPVRGAITRGATVTRGVPPPPTVRGAPAPRARTAGIQRIPLPPPPAPETYEEYGYDDTYAEQSYEGYEGYYSQSQGDSEYYDYGHGEVQDSYEAYGQDDWNGTRPSLKAPPARPVKGAYREHPYGRY

SEQ ID NO: 138 - protein, 1544 aa, Homo sapiens
MEAATTLHPGPRPALPLGGPGPLGEFLPPPECPVFEPSWEEFADPFAFIHKIRPIAEQTGICKVRPPPDWQPPFACDVDKLHFTPRIQRLNELEAQTRVKLNFLDQIAKYWELQGSTLKIPHVERKILDLFQLNKLVAEEGGFAVVCKDRKWTKIATKMGFAPGKAVGSHIRGHYERILNPYNLFLSGDSLRCLQKPNLTTDTKDKEYKPHDIPQRQSVQPSETCPPARRAKRMRAEAMNIKIEPEETTEARTHNLRRRMGCPTPKCENEKEMKSSIKQEPIERKDYIVENEKEKPKSRSKKATNAVDLYVCLLCGSGNDEDRLLLCDGCDDSYHTFCLIPPLHDVPKGDWRCPKCLAQECSKPQEAFGFEQAARDYTLRTFGEMADAFKSDYFNMPVHMVPTELVEKEFWRLVSTIEEDVTVEYGADIASKEFGSGFPVRDGKIKLSPEEEEYLDSGWNLNNMPVMEQSVLAHITADICGMKLPWLYVGMCFSSFCWHIEDHWSYSINYLHWGEPKTWYGVPGYAAEQLENVMKKLAPELFVSQPDLLHQLVTIMNPNTLMTHEVPVYRTNQCAGEFVITFPRAYHSGFNQGFNFAEAVNFCTVDWLPLGRQCVEHYRLLHRYCVFSHDEMICKMASKADVLDVVVASTVQKDMAIMIEDEKALRETVRKLGVIDSERMDFELLPDDERQCVKCKTTCFMSAISCSCKPGLLVCLHHVKELCSCPPYKYKLRYRYTLDDLYPMMNALKLRAESYNEWALNVNEALEAKINKKKSLVSFKALIEESEMKKFPDNDLLRHLRLVTQDAEKCASVAQQLLNGKRQTRYRSGGGKSQNQLTVNELRQFVTQLYALPCVLSQTPLLKDLLNRVEDFQQHSQKLLSEETPSAAELQDLLDVSFEFDVELPQLAEMRIRLEQARWLEEVQQACLDPSSLTLDDMRRLIDLGVGLAPYSAVEKAMARLQELLTVSEHWDDKAKSLLKARPRHSLNSLATAVKEIEEIPAYLPNGAALKDSVQRARDWLQDVEGLQAGGRVPVLDTLIELVTRGRSIPVHLNSLPRLETLVAEVQAWKECAVNTFLTENSPYSLLEVLCPRCDIGLLGLKRKQRKLKEPLPNGKKKSTKLESLSDLERALTESKETASAMATLGEARLREMEALQSLRLANEGKLLSPLQDVDIKICLCQKAPAAPMIQCELCRDAFHTSCVAVPSISQGLRIWLCPHCRRSEKPPLEKILPLLASLQRIRVRLPEGDALRYMIERTVNWQHRAQQLLSSGNLKFVQDRVGSGLLYSRWQASAGQVSDTNKVSQPPGTTSFSLPDDWDNRTSYLHSPFSTGRSCIPLHGVSPEVNELLMEAQLLQVSLPEIQELYQTLLAKPSPAQQTDRSSPVRPSSEKNDCCRGKRDGINSLERKLKRRLEREGLSSERWERVKKMRTPKKKKIKLSHPKDMNNFKLERERSYELVRSAETHSLPSDTSYSEQEDSEDEDAICPAVSCLQPEGDEVDWVQCDGSCNQWFHQVCVGVSPEMAEKEDYICVRCTVKDAPSRK

SEQ ID NO: 139 - protein, 704 aa, Homo sapiens
PGPPPAFSLRFPWSLRGVRSRWAPGKMAAAAGDGGGEGGAGLGSAAGLGPGPGLRGQGPSAEAHEGAPDPMPAALHPEEVAARLQRMQRELSNRRKILVKNLPQDSNCQEVHDLLKDYDLKYCYVDRNKRTAFVTLLNGEQAQNAIQMFHQYSFRGKDLIVQLQPTDALLCITNVPISFTSEEFEELVRAYGNIERCFLVYSEVTGHSKGYGFVEYMKKDFAAKARLELLGRQLGASALFAQWMDVNLLASELIHSKCLCIDKLPSDYRDSEELLQIFSSVHKPVFCQLAQDEGSYVGGFAVVEYSTAEQAEEVQQAADGMTIKGSKVQVSFCAPGAPGRSTLAALIAAQRVMHSNQKGLLPEPNPVQIMKSLNNPAMLQVLLQPQLCGRAVKPAVLGTPHSLPHLMNPSISPAFLHLNKAHQNLSHIPLAQQQLMKFENIHTNNKPGLLGEPPAVVLQTALGIGSVLPLKKELGHHHGEAHKTSSLIPTQTTITAGMGMLPFFPNQHIAGQAGPGHSNTQEKQPATVGMAEGNFSGSQPYLQSFPNLAAGSLLVGHHKQQQSQPKGTEISSGAASKNQTSLLGEPPKEIRLSKNPYLNLASVLPSVCLSSPASKTTLHKTGIASSILDAISQGSESQHALEKCIAYSPPFGDYAQVSSLRNEKRGSSYLISAPEGGSVECVDQHSQGTGAYYMETYLKKKRVY

SEQ ID NO: 140 - protein, 635 aa, Homo sapiens
RMLGLDGSLVFLEHVFWVVSLNTLFILVFAFCPYHIGHFSLVGLGFEEHVQASHFEGLITTIVGYILLAITLIICHGLATLVKFHRSRRLLGVCYIVVKVSLLVVVEIGVFPLICGWWLDICSLEMFDATLKDRELSFQSAPGTTMFLHWLVGMVYVFYFASFILLLREVLRPGVLWFLRNLNDPDFNPVQEMIHLPIYRHLRRFILSVIVFGSIVLLMLWLPIRIIKSVLPNFLPYNVMLYSDAPVSELSLELLLLQVVLPALLEQGHTRQWLKGLVRAWTVTAGYLLDLHSYLLGDQEENENSANQQVNNNQHARNNNAIPVVGEGLHAAHQAILQQGGPVGFQPYRRPLNFPLRIFLLIVFMCITLLIASLICLTLPVFAGRWLMSFWTGTAKIHELYTAACGLYVCWLTIRAVTVMVAWMPQGRRVIFQKVKEWSLMIMKTLIVAVLLAGVVPLLLGLLFELVIVAPLRVPLDQTPLFYPWQDWALGVLHAKIIAAITLMGPQWWLKTVIEQVYANGIRNIDLHYIVRKLAAPVISVLLLSLCVPYVIASGVVPLLGVTAEMQNLVHRRIYPFLLMVVVLMAILSFQVRQFKRLYEHIKNDKYLVGQRLVNYERKSGKQGSSPPPPQSSQE

SEQ ID NO: 141 - protein, 971 aa, Homo sapiens
VSLAFCQPLSLSLSPLLPLASSLAPERTHLPGPGSLLLSPPSFPARPREPRGCVTAAPPDKMDTAEEDICRVCRSEGTPEKPLYHPCVCTGSIKFIHQECLVQWLKHSRKEYCELCKHRFAFTPIYSPDMPSRLPIQDIFAGLVTSIGTAIRYWFHYTLVAFAWLGVVPLTACRIYKCLFTGSVSSLLTLPLDMLSTENLLADCLQGCFVVTCTLCAFISLVWLREQIVHGGAPIWLEHAAPPFNAAGHHQNEAPAGGNGAENVAADQPANPPAENAVVGENPDAQDDQAEEEEEDNEEEDDAGVEDAADANNGAQDDMNWNALEWDRAAEELTWERMLGLDGSLVFLEHVFWVVSLNTLFILVFAFCPYHIGHFSLVGLGFEEHVQASHFEGLITTIVGYILLAITLIICHGLATLVKFHRSRRLLGVCYIVVKVSLLVVVEIGVFPLICGWWLDICSLEMFDATLKDRELSFQSAPGTTMFLHWLVGMVYVFYFASFILLLREVLRPGVLWFLRNLNDPDFNPVQEMIHLPIYRHLRRFILSVIVFGSIVLLMLWLPIRIIKSVLPNFLPYNVMLYSDAPVSELSLELLLLQVVLPALLEQGHTRQWLKGLVRAWTVTAGYLLDLHSYLLGDQEENENSANQQVNNNQHARNNNAIPVVGEGLHAAHQAILQQGGPVGFQPYRRPLNFPLRIFLLIVFMCITLLIASLICLTLPVFAGRWLMSFWTGTAKIHELYTAACGLYVCWLTIRAVTVMVAWMPQGRRVIFQKVKEWSLMIMKTLIVAVLLAGVVPLLLGLLFELVIVAPLRVPLDQTPLFYPWQDWALGVLHAKIIAAITLMGPQWWLKTVIEQVYANGIRNIDLHYIVRKLAAPVISVLLLSLCVPYVIASGVVPLLGVTAEMQNLVHRRIYPFLLMVVVLMAILSFQVRQFKRLYEHIKNDKYLVGQRLVNYERKSGKQGSSPPPPQSSQE

SEQ ID NO: 142 - protein, 590 aa, Homo sapiens
MSRQSSVSFRSGGSRSFSTASAITPSVSRTSFTSVSRSGGGGGGGFGRVSLAGACGVGGYGSRSLYNLGGSKRISISTRGGSFRNRFGAGAGGGYGFGGGAGSGFGFGGGAGGGFGLGGGAGFGGGFGGPGFPVCPPGGIQEVTVNQSLLTPLNLQIDPSIQRVRTEEREQIKTLNNKFASFIDKVRFLEQQNKVLDTKWTLLQEQGTKTVRQNLEPLFEQYINNLRRQLDSIVGERGRLDSELRNMQDLVEDFKNKYEDEINKRTTAENEFVMLKKDVDAAYMNKVELEAKVDALMDEINFMKMFFDAELSQMQTHVSDTSVVLSMDNNRNLDLDSIIAEVKAQYEEIANRSRTEAESWYQTKYEELQQTAGRHGDDLRNTKHEITEMNRMIQRLRAEIDNVKKQCANLQNAIADAEQRGELALKDARNKLAELEEALQKAKQDMARLLREYQELMNTKLALDVEIATYRKLLEGEECRLSGEGVGPVNISVVTSSVSSGYGSGSGYGGGLGGGLGGGLGGGLAGGSSGSYYSSSSGGVGLGGGLSVGGSGFSASSGRGLGVGFGSGGGSSSSVKFVSTTSSSRKSFKS

SEQ ID NO: 143 - protein, 493 aa, Homo sapiens
MLKALFLTMLTLALVKSQDTEETITYTQCTDGYEWDPVRQQCKDIDECDIVPDACKGGMKCVNHYGGYLCLPKTAQIIVNNEQPQQETQPAEGTSGATTGVVAASSMATSGVLPGGGFVASAAAVAGPEMQTGRNNFVIRRNPADPQRIPSNPSHRIQCAAGYEQSEHNVCQDIDECTAGTHNCRADQVCINLRGSFACQCPPGYQKRGEQCVDIDECTIPPYCHQRCVNTPGSFYCQCSPGFQLAANNYTCVDINECDASNQCAQQCYNILGSFICQCNQGYELSSDRLNCEDIDECRTSSYLCQYQCVNEPGKFSCMCPQGYQVVRSRTCQDINECETTNECREDEMCWNYHGGFRCYPRNPCQDPYILTPENRCVCPVSNAMCRELPQSIVYKYMSIRSDRSVPSDIFQIQATTIYANTINTFRIKSGNENGEFYLRQTSPVSAMLVLVKSLSGPREHIVDLEMLTVSSIGTFRTSSVLRLTIIVGPFSF

SEQ ID NO: 144 - protein, 679 aa, Homo sapiens
MATLITSTTAATAASGPLVDYLWMLILGFIIAFVLAFSVGANDVANSFGTAVGSGVVTLKQACILASIFETVGSVLLGAKVSETIRKGLIDVEMYNSTQGLLMAGSVSAMFGSAVWQLVASFLKLPISGTHCIVGATIGFSLVAKGQEGVKWSELIKIVMSWFVSPLLSGIMSGILFFLVRAFILHKADPVPNGLRALPVFYACTVGINLFSIMYTGAPLLGFDKLPLWGTILISVGCAVFCALIVWFFVCPRMKRKIEREIKCSPSESPLMEKKNSLKEDHEETKLSVGDIENKHPVSEVGPATVPLQAVVEERTVSFKLGDLEEAPERERLPSVDLKEETSIDSTVNGAVQLPNGNLVQFSQAVSNQINSSGHYQYHTVHKDSGLYKELLHKLHLAKVGDCMGDSGDKPLRRNNSYTSYTMAICGMPLDSFRAKEGEQKGEEMEKLTWPNADSKKRIRMDSYTSYCNAVSDLHSASEIDMSVKAEMGLGDRKGSNGSLEEWYDQDKPEVSLLFQFLQILTACFGSFAHGGNDVSNAIGPLVALYLVYDTGDVSSKVATPIWLLLYGGVGICVGLWVWGRRVIQTMGKDLTPITPSSGFSIELASALTVVIASNIGLPISTTHCKVGSVVSVGWLRSKKAVDWRLFRNIFMAWFVTVPISGVISAAIMAIFRYVILRM

SEQ ID NO: 145 - protein, 208 aa, Homo sapiens
MDKNENEEADLDEQSSKRLSIRERRRPKERRRGTGINFWTKDEDETDGSEEVKETWHERLSRLESGGSNPTTSDSYGDRASARARREAREARLATLTSRVEEDSNRDYKKLYESALTENQKLKTKLQEAQLELADIKSKLEKVAQQKQEKTSDRSSVLEMEKRERRALERKMSEMEEEMKVLTELKSDNQRLKDENGALIRVISKLSK

SEQ ID NO: 146 - protein, 120 aa, Homo sapiens
MDDSKVVGGKVKKPGKRGRKPAKIDLKAKLERSRQSARECRARKKLRYQYLEELVSSRERAICALREELEMYKQWCMAMDQGKIPSEIKALLTGEEQNKSQQNSSRHTKAGKTDANSNSW

SEQ ID NO: 147 - protein, 113 aa, Homo sapiens
MSAIQNLHSFDPFADASKGDDLLPAGTEDYIHIRIQQRNGRKTLTTVQGIADDYDKKKLVKAFKKKFACNGTVIEHPEYGEVIQLQGDQRKNICQFLVEIGLAKDDQLKVHGF

SEQ ID NO: 148 - protein, 314 aa, Homo sapiens
MGIGRSEGGRRGAALGVLLALGAALLAVGSASEYDYVSFQSDIGPYQSGRFYTKPPQCVDIPADLRLCHNVGYKKMVLPNLLEHETMAEVKQQASSWVPLLNKNCHAGTQVFLCSLFAPVCLDRPIYPCRWLCEAVRDSCEPVMQFFGFYWPEMLKCDKFPEGDVCIAMTPPNATEASKPQGTTVCPPCDNELKSEAIIEHLCASEFALRMKIKEVKKENGDKKIVPKKKKPLKLGPIKKKDLKKLVLYLKNGADCPCHQLDNLSHHFLIMGRKVKSQYLLTAIHKWDKKNKEFKNFMKKMKNHECPTFQSVFK

SEQ ID NO: 149 - protein, 304 aa, Homo sapiens
MAGNFDSEERSSWYWGRLSRQEAVALLQGQRHGVFLVRDSSTSPGDYVLSVSENSRVSHYIINSSGPRPPVPPSPAQPPPGVSPSRLRIGDQEFDSLPALLEFYKIHYWDTTTLIEPVSRSRQGSGVILRQEEAEYVRALFDFNGNDEEDLPFKKGDILRIRDKPEEQWWNAEDSEGKRGMIPVPYVEKYRPASASVSALIGGNQEGSHPQPLGPPEPGPYAQPSVNTPLPNLQNGPIYARVIQKRVPNAYDKTALALEVGELVKVTKINVSGQWEGGCNGKRGHFPFTHVRLLDQQNPDEDFS

SEQ ID NO: 150 - protein, 1464 aa, Homo sapiens
MFSFVDLRLLLLLAATALLTHGQEEGQVEGQDEDIPPITCVQNGLRYHDRDVWKPEPCRICVCDNGKVLCDDVICDETKNCPGAEVPEGECCPVCPDGSESPTDQETTGVEGPKGDTGPRGPRGPAGPPGRDGIPGQPGLPGPPGPPGPPGPPGLGGNFAPQLSYGYDEKSTGGISVPGPMGPSGPRGLPGPPGAPGPQGFQGPPGEPGEPGASGPMGPRGPPGPPGKNGDDGEAGKPGRPGERGPPGPQGARGLPGTAGLPGMKGHRGFSGLDGAKGDAGPAGPKGEPGSPGENGAPGQMGPRGLPGERGRPGAPGPAGARGNDGATGAAGPPGPTGPAGPPGFPGAVGAKGEAGPQGPRGSEGPQGVRGEPGPPGPAGAAGPAGNPGADGQPGAKGANGAPGIAGAPGFPGARGPSGPQGPGGPPGPKGNSGEPGAPGSKGDTGAKGEPGPVGVQGPPGPAGEEGKRGARGEPGPTGLPGPPGERGGPGSRGFPGADGVAGPKGPAGERGSPGPAGPKGSPGEAGRPGEAGLPGAKGLTGSPGSPGPDGKTGPPGPAGQDGRPGPPGPPGARGQAGVMGFPGPKGAAGEPGKAGERGVPGPPGAVGPAGKDGEAGAQGPPGPAGPAGERGEQGPAGSPGFQGLPGPAGPPGEAGKPGEQGVPGDLGAPGPSGARGERGFPGERGVQGPPGPAGPRGANGAPGNDGAKGDAGAPGAPGSQGAPGLQGMPGERGAAGLPGPKGDRGDAGPKGADGSPGKDGVRGLTGPIGPPGPAGAPGDKGESGPSGPAGPTGARGAPGDRGEPGPPGPAGFAGPPGADGQPGAKGEPGDAGAKGDAGPPGPAGPAGPPGPIGNVGAPGAKGARGSAGPPGATGFPGAAGRVGPPGPSGNAGPPGPPGPAGKEGGKGPRGETGPAGRPGEVGPPGPPGPAGEKGSPGADGPAGAPGTPGPQGIAGQRGVVGLPGQRGERGFPGLPGPSGEPGKQGPSGASGERGPPGPMGPPGLAGPPGESGREGAPGAEGSPGRDGSPGAKGDRGETGPAGPPGAPGAPGAPGPVGPAGKSGDRGETGPAGPAGPVGPAGARGPAGPQGPRGDKGETGEQGDRGIKGHRGFSGLQGPPGPPGSPGEQGPSGASGPAGPRGPPGSAGAPGKDGLNGLPGPIGPPGPRGRTGDAGPVGPPGPPGPPGPPGPPSAGFDFSFLPQPPQEKAHDGGRYYRADDANVVRDRDLEVDTTLKSLSQQIENIRSPEGSRKNPARTCRDLKMCHSDWKSGEYWIDPNQGCNLDAIKVFCNMETGETCVYPTQPSVAQKNWYISKNPKDKRHVWFGESMTDGFQFEYGGQGSDPADVAIQLTFLRLMSTEASQNITYHCKNSVAYMDQQTGNLKKALLLKGSNEIEIRAEGNSRFTYSVTVDGCTSHTGAWGKTVIEYKTTKTSRLPIIDVAPLDVGAPDQEFGFDVGPVCFL

SEQ ID NO: 151 - protein, 135 aa, Homo sapiens
MATVQQLEGRWRLVDSKGFDEYMKELGVGIALRKMGAMAKPDCIITCDGKNLTIKTESTLKTTQFSCTLGEKFEETTADGRKTQTVCNFTDGALVQHQEWDGKESTITRKLKDGKLVVECVMNNVTCTRIYEKVE

SEQ ID NO: 152 - protein, 464 aa, Homo sapiens
LLEGGKGGIADSVAKWIFKQDFSPEVLKLANEERDAENPDEPKEGVNRSFLEVSEMEMDLGAIPDLLHLAYEQFPCSLELDVLHAHCCWEYVVQWNKDPEEARFFVRSIEHLKQIFNAHVQNGIALMMWNTFLVKRFSAATYLMDKVGKSPKDRLCRRDVGMSDTAMTSFLGSCLDLLQILMEADVSRDEIQVPVLDTEDAWLSVEGPISIVELALEQKHIHYPLVEHHSILCSILYAVMRFSLKTVKPLSLFDSKGKNAFFKDLTSIQLLPSGEMDPNFISVRQQFLLKVVSAAVQAQHSATKVKDPTEEATPTPFGKDQDWPALAVDLAHHLQVSEDVVRRHYVGELYNYGVDHLGEEAILQVHDKEVLASQLLVLTGQRLAHALLHTQTKEGMELLARLPPTLCTWLKAMDPQDLQNTEVPIATTAKLVNKVIELLPEKHGQYGLALHLIEAVEAISLPSL

SEQ ID NO: 153 - protein, 1366 aa, Homo sapiens
MLSFVDTRTLLLLAVTLCLATCQSLQEETVRKGPAGDRGPRGERGPPGPPGRDGEDGPTGPPGPPGPPGPPGLGGNFAAQYDGKGVGLGPGPMGLMGPRGPPGAAGAPGPQGFQGPAGEPGEPGQTGPAGARGPAGPPGKAGEDGHPGKPGRPGERGVVGPQGARGFPGTPGLPGFKGIRGHNGLDGLKGQPGAPGVKGEPGAPGENGTPGQTGARGLPGERGRVGAPGPAGARGSDGSVGPVGPAGPNGSAGPPGFPGAPGPKGEIGAVGNAGPTGPAGPRGEVGLPGLSGPVGPPGNPGANGLTGAKGAAGLPGVAGAPGLPGPRGIPGPVGAAGATGARGLVGEPGPAGSKGESGNKGEPGSAGPQGPPGPSGEEGKRGPNGEAGSAGPPGPPGLRGSPGSRGLPGADGRAGVMGPPGSRGASGPAGVRGPNGDAGRPGEPGLMGPRGLPGSPGNIGPAGKEGPVGLPGIDGRPGPIGPAGARGEPGNIGFPGPKGPTGDPGKNGDKGHAGLAGARGAPGPDGNNGAQGPPGPQGVQGGKGEQGPDGPPGFQGLPGPSGPAGEVGKPGERGLHGEFGLPGPAGPRGERGPPGESGAAGPTGPIGSRGPSGPPGPDGNKGEPGVVGAVGTAGPSGPSGLPGERGAAGIPGGKGEKGEPGLRGEIGNPGRDGARGAHGAVGAPGPAGATGDRGEAGAAGPAGPAGPRGSPGERGEVGPAGPNGFAGPAGAAGQPGAKGERGGKGPKGENGVVGPTGPVGAAGPAGPNGPPGPAGSRGDGGPPGMTGFPGAAGRTGPPGPSGISGPPGPPGPAGKEGLRGPRGDQGPVGRTGEVGAVGPPGFAGEKGPSGEAGTAGPPGTPGPQGLLGAPGILGLPGSRGERGLPGVAGAVGEPGPLGIAGPPGARGPPGAVGSPGVNGAPGEAGRDGNPGNDGPPGRDGQPGHKGERGYPGNIGPVGAAGAPGPHGPVGPAGKHGNRGETGPSGPVGPAGAVGPRGPSGPQGIRGDKGEPGEKGPRGLPGFKGHNGLQGLPGIAGHHGDQGAPGSVGPAGPRGPAGPSGPAGKDGRTGHPGTVGPAGIRGPQGHQGPAGPPGPPGPPGPPGVSGGGYDFGYDGDFYRADQPRSAPSLRPKDYEVDATLKSLNNQIETLLTPEGSRKNPARTCRDLRLSHPEWSSGYYWIDPNQGCTMEAIKVYCDFPTGETCIRAQPENIPAKNWYRSSKDKKHVWLGETINAGSQFEYNVEGVTSKEMATQLAFMRLLANYASQNITYHCKNSIAYMDEETGNLKKAVILQGSNDVELVAEGNSRFTYTVLVDGCSKKTNEWGKTIIEYKTNKPSRLPFLDIAPLDIGGADHEFFVDIGPVCFK

SEQ ID NO: 154 - protein, 346 aa, Homo sapiens
MESVSCSAAAVRTGDMESQRDLSLVPERLQRREQERQLEVERRKQKRQNQEVEKENSHFFVATFARERAAVEELLERAESVERLEEAASRLQGLQKLINDSVFFLAAYDLRQGQEALARLQAALAERRRGLQPKKRFAFKTRGKDAASSTKVDAAPGIPPAVESIQDSPLPKKAEGDLGPSWVCGFSNLESQVLEKRASELHQRDVLLTELSNCTVRLYGNPNTLRLTKAHSCKLLCGPVSTSVFLEDCSDCVLAVACQQLRIHSTKDTRIFLQVTSRAIVEDCSGIQFAPYTWSYPEIDKDFESSGLDRSKNNWNDVDDFNWLARDMASPNWSILPEEERNIQWD

SEQ ID NO: 155 - protein, 297 aa, Homo sapiens
MEDYTKIEKIGEGTYGVVYKGRHKTTGQVVAMKKIRLESEEEGVPSTAIREISLLKELRHPNIVSLQDVLMQDSRLYLIFEFLSMDLKKYLDSIPPGQYMDSSLVKSYLYQILQGIVFCHSRRVLHRDLKPQNLLIDDKGTIKLADFGLARAFGIPIRVYTHEVVTLWYRSPEVLLGSARYSTPVDIWSIGTIFAELATKKPLFHGDSEIDQLFRIFRALGTPNNEVWPEVESLQDYKNTFPKWKPGSLASHVKNLDENGLDLLSKMLIYDPAKRISGKMALNHPYFNDLDNQIKKM

SEQ ID NO: 156 - protein, 813 aa, Homo sapiens [sequence omitted]

SEQ ID NO: 157 - protein, 1299 aa, Homo sapiens
MEPPSCIQDEPFPHPLEPEPGVSAQPGPGKPSDKRFRLWYVGGSCLDHRTTLPMLPWLMAEIRRRSQKPEAGGCGAPAAREVILVLSAPFLRCVPAPGAGASGGTSPSATQPNPAVFIFEHKAQHISRFIHNSHDLTYFAYLIKAQPDDPESQMACHVFRATDPSQVPDVISSIRQLSKAAMKEDAKPSKDNEDAFYNSQKFEVLYCGKVTVTHKKAPSSLIDDCMEKFSLHEQQRLKIQGEQRGPDPGEDLADLEVVVPGSPGDCLPEEADGTDTHLGLPAGASQPALTSSRVCFPERILEDSGFDEQQEFRSRCSSVTGVQRRVHEGSQKSQPRRRHASAPSHVQPSDSEKNRTMLFQVGRFEINLISPDTKSVVLEKNFKDISSCSQGIKHVDHFGFICRESPEPGLSQYICYVFQCASESLVDEVMLTLKQAFSTAAALQSAKTQIKLCEACPMHSLHKLCERIEGLYPPRAKLVIQRHLSSLTDNEQADIFERVQKMKPVSDQEENELVILHLRQLCEAKQKTHVHIGEGPSTISNSTIPENATSSGRFKLDILKNKAKRSLTSSLENIFSRGANRMRGRLGSVDSFERSNSLASEKDYSPGDSPPGTPPASPPSSAWQTFPEEDSDSPQFRRRAHTFSHPPSSTKRKLNLQDGRAQGVRSPLLRQSSSEQCSNLSSVRRMYKESNSSSSLPSLHTSFSAPSFTAPSFLKSFYQNSGRLSPQYENEIRQDTASESSDGEGRKRTSSTCSNESLSVGGTSVTPRRISWRQRIFLRVASPMNKSPSAMQQQDGLDRNELLPLSPLSPTMEEEPLVIFLSGEDDPEKIEERKKSKELRSLWRKAIHQQILLLRMEKENQKLEGASRDELQSRKVKLDYEEVGACQKEVLITWDKKLLNCRAKIRCDMEDIHTLLKEGVPKSRRGEIWQFLALQYRLRHRLPNKQQPPDISYKELLKQLTAQQHAILVDLGRTFPTHPYFSVQLGPGQLSLFNLLKAYSLLDKEVGYCQGISFVAGVLLLHMSEEQAFEMLKFLMYDLGFRKQYRPDMMSLQIQMYQLSRLLHDYHRDLYNHLEENEISPSLYAAPWFLTLFASQFSLGFVARVFDIIFLQGTEVIFKVALSLLSSQETLIMECESFENIVEFLKNTLPDMNTSEMEKIITQVFEMDISKQLHAYEVEYHVLQDELQESSYSCEDSETLEKLERANSQLKRQNMDLLEKLQVAHTKIQALESNLENLLTRETKMKSLIRTLEQEKMAYQKTVEQLRKLLPADALANCDLLLRDLNCNPNNKAKIGNKP

SEQ ID NO: 158 - protein, 465 aa, Homo sapiens
MASTTSTKKMMEEATCSICLSLMTNPVSINCGHSYCHLCITDFFKNPSQKQLRQETFCCPQCRAPFHMDSLRPNKQLGSLIEALKETDQEMSCEEHGEQFHLFCEDEGQLICWRCERAPQHKGHTTALVEDVCQGYKEKLQKAVTKLKQLEDRCTEQKLSTAMRITKWKEKVQIQRQKIRSDFKNLQCFLHEEEKSYLWRLEKEEQQTLSRLRDYEAGLGLKSNELKSHILELEEKCQGSAQKLLQNVNDTLSRSWAVKLETSEAVSLELHTMCNVSKLYFDVKKMLRSHQVSVTLDPDTAHHELILSEDRRQVTRGYTQENQDTSSRRFTAFPCVLGCEGFTSGRRYFEVDVGEGTGWDLGVCMENVQRGTGMKQEPQSGFWTLRLCKKKGYVALTSPPTSLHLHEQPLLVGIFLDYEAGVVSFYNGNTGCHIFTFPKASFSDTLRPYFQVYQYSPLFLPPPGD

SEQ ID NO: 159 - protein, 252 aa, Homo sapiens
METLESELTCPICLELFEDPLLLPCAHSLCFSCAHRILVSSCSSGESIEPITAFQCPTCRYVISLNHRGLDGLKRNVTLQNIIDRFQKASVSGPNSPSESRRERTYRPTTAMSSERIACQFCEQDPPRDAVKTCITCEVSYCDRCLRATHPNKKPFTSHRLVEPVPDTHLRGITCLDHENEKVNMYCVSDDQLICALCKLVGRHRDHQVASLNDRFEKLKQTLEMNLTNLVKRNSELENQMAKLIQICQQVE

SEQ ID NO: 160 - protein, 583 aa, Homo sapiens
MKLLHVFLLFLCFHLRFCKVTYTSQEDLVEKKCLAKKYTHLSCDKVFCQPWQRCIEGTCVCKLPYQCPKNGTAVCATNRRSFPTYCQQKSLECLHPGTKFLNNGTCTAEGKFSVSLKHGNTDSEGIVEVKLVDQDKTMFICKSSWSMREANVACLDLGFQQGADTQRRFKLSDLSINSTECLHVHCRGLETSLAECTFTKRRTMGYQDFADVVCYTQKADSPMDDFFQCVNGKYISQMKACDGINDCGDQSDELCCKACQGKGFHCKSGVCIPSQYQCNGEVDCITGEDEVGCAGFASVAQEETEILTADMDAERRRIKSLLPKLSCGVKNRMHIRRKRIVGGKRAQLGDLPWQVAIKDASGITCGGIYIGGCWILTAAHCLRASKTHRYQIWTTVVDWIHPDLKRIVIEYVDRIIFHENYNAGTYQNDIALIEMKKDGNKKDCELPRSIPACVPWSPYLFQPNDTCIVSGWGREKDNERVFSLQWGEVKLISNCSKFYGNRFYEKEMECAGTYDGSIDACKGDSGGPLVCMDANNVTYVWGVVSWGENCGKPEFPGVYTKVANYFDWISYHVGRPFISQYNV

SEQ ID NO: 161 - protein, 255 aa, Homo sapiens
MALNVAPVRDTKWLTLEVCRQFQRGTCSRSDEECKFAHPPKSCQVENGRVIACFDSLKGRCSRENCKYLHPPTHLKTQLEINGRNNLIQQKTAAAMLAQQMQFMFPGTPLHPVPTFPVGPAIGTNTAISFAPYLAPVTPGVGLVPTEILPTTPVIVPGSPPVTVPGSTATQKLLRTDKLEVCREFQRGNCARGETDCRFAHPADSTMIDTSDNTVTVCMDYIKGRCMREKCKYFHPPAHLQAKIKAAQPRPRPQS

SEQ ID NO: 162 - protein, 337 aa, Homo sapiens
MGKDYYCILGIEKGASDEDIKKAYRKQALKFHPDKNKSPQAEEKFKEVAEAYEVLSDPKKREIYDQFGEEGLKGGAGGTDGQGGTFRYTFHGDPHATFAAFFGGSNPFEIFFGRRMGGGRDSEEMEIDGDPFSAFGFSMNGYPRDRNSVGPSRLKQDPPVIHELRVSLEEIYSGCTKRMKISRKRLNADGRSYRSEDKILTIEIKKGWKEGTKITFPREGDETPNSIPADIVFIIKDKDHPKFKRDGSNIIYTAKISLREALCGCSINVPTLDGRNIPMSVNDIVKPGMRRRIIGYGLPFPKNPDQRGDLLIEFEVSFPDTISSSSKEVLRKHLPAS

SEQ ID NO: 163 - protein, 297 aa, Homo sapiens
MSSAHFNRGPAYGLSAEVKNKLAQKYDHQREQELREWIEGVTGRRIGNNFMDGLKDGIILCEFINKLQPGSVKKINESTQNWHQLENIGNFIKAITKYGVKPHDIFEANDLFENTNHTQVQSTLLALASMAKTKGNKVNVGVKYAEKQERKFEPGKLREGRNIIGLQMGTNKFASQQGMTAYGTRRHLYDPKLGTDQPLDQATISLQMGTNKGASQAGMTAPGTKRQIFEPGLGMEHCDTLNVSLQMGSNKGASQRGMTVYGLPRQVYDPKYCLTPEYPELGEPAHNHHAHNYYNSA

SEQ ID NO: 164 - protein, 918 aa, Homo sapiens
LPEMPRGSRARGSKRKRSWNTECPSFPGERPLQVRRAGLRTAGAAASLSEAWLRCGEGFQNTSGNPSLTAEEKTITEKHLELCPRPKQETTTSKSTSGLTDITWSSSGSDLSDEDKTLSQLQRDELQFIDWEIDSDRAEASDCDEFEDDEGAVEISDCASCASNQSLTSDEKLSELPKPSSIEILEYSSDSEKEDDLENVLLIDSESPHKYHVQFASDARQIMERLIDPRTKSTETILHTPQKPTAKFPRTPENSAKKKLLRGGLAERLNGLQNRERSAISLWRHQCISYQKTLSGRKSGVLTVKILELHEECAMQVAMCEQLLGSPATSSSQSVAPRPGAGLKVLFTKETAGYLRGRPQDTVRIFPPWQKLIIPSGSCPVILNTYFCEKVVAKEDSEKTCEVYCPDIPLPRRSISLAQMFVIKGLTNNSPEIQVVCSGVATTGTAWTHGHKEAKQRIPTSTPLRDSLLDVVESQGAASWPGAGVRVVVQRVYSLPSRDSTRGQQGASSGHTDPAGTRACLLVQDACGMFGEVHLEFTMSKARQLEGKSCSLVGMKVLQKVTRGRTAGIFSLIDTLWPPAIPLKTPGRDQPCEEIKTHLPPPALCYILTAHPNLGQIDIIDEDPIYKLYQPPVTRCLRDILQMNDLGTRCSFYATVIYQKPQLKSLLLLEQREIWLLVTDVTLQTKEERDPRLPKTLLVYVAPLCVLGSEVLEALAGAAPHSLFFKDALRDQGRIVCAERTVLLLQKPLLSVVSGASSCELPGPVMLDSLDSATPVNSICSVQGTVVGVDESTAFSWPVCDMCGNGRLEQRPEDRGAFSCGDCSRVVTSPVLKRHLQVFLDCRSRPQCRVKVKLLQRSISSLLRFAAGEDGSYEVKSVLGKEVGLLNCFVQSVTAHPTSCIGLEEIELLSAGGASAEH

SEQ ID NO: 165 - protein, 214 aa, Homo sapiens
MNVFRILGDLSHLLAMILLLGKIWRSKCCKGISGKSQILFALVFTTRYLDLFTNFISIYNTVMKVVFLLCAYVTVYMIYGKFRKTFDSENDTFRLEFLLVPVIGLSFLENYSFTLLEILWTFSIYLESVAILPQLFMISKTGEAETITTHYLFFLGLYRALYLANWIRRYQTENFYDQIAVVSGVVQTIFYCDFFYLYVTKVLKGKKLSLPMPI

SEQ ID NO: 166 - protein, 752 aa, Homo sapiens
MVVDEQQRLTAQLTLQRQKIQELTTNAKETHTKLALAEARVQEEEQKATRLEKELQTQTTKFHQDQDTIMAKLTNEDSQNRQLQQKLAALSRQIDELEETNRSLRKAEEELQDIKEKISKGEYGNAGIMAEVEELIKMEEQCRDLNKRLERETLQSKDFKLEVEKLSKRIMALEKLEDAFNKSKQECYSLKCNLEKERMTTKQLSQELESLKVRIKELEAIESRLEKTEFTLKEDLTKLKTLTVMFVDERKTMSEKLKKTEDKLQAASSQLQVEQNKVTTVTEKLIEETKRALKSKTDVEEKMYSVTKERDDLKNKLKAEEEKGNDLLSRVNMLKNRLQSLEAIEKDFLKNKLNQDSGKSTTALHQENNKIKELSQEVERLKLKLKDMKAIEDDLMKTEDEYETLERRYANERDKAQFLSKELEHVKMELAKYKLAEKTETSHEQWLFKRLQEEEAKSGHLSREVDALKEKIHEYMATEDLICHLQGDHSVCKKKLNQQENRNRDLGREIENLTKELERYRHFSKSLRPSLNGRRISDPQVFSKEVQTEAVDNEPPDYKSLIPLERAVINGQLYEESENQDEDPNDEGSVLSFKCSQSTPCPVNRKLWIPWMKSKEGHLQNGKMQTKPNANFVQPGDLVLSHTPGQPLHIKVTPDHVQNTATLEITSPTTESPHSYTSTAVIPNCGTPKQRITILQNASITPVKSKTSTEDLMNLEQGMSPITMATFARAQTPESCGSLTPERTMSLFRFWL

SEQ ID NO: 167 - protein, 445 aa, Homo sapiens
MREIVHIQAGQCGNQIGAKFWEVISDEHGIDPTGSYHGDSDLQLERINVYYNEAAGNKYVPRAILVDLEPGTMDSVRSGPFGQIFRPDNFVFGQSGAGNNWAKGHYTEGAELVDSVLDVVRKESESCDCLQGFQLTHSLGGGTGSGMGTLLISKIREEYPDRIMNTFSVMPSPKVSDTVVEPYNATLSVHQLVENTDETYSIDNEALYDICFRTLKLTTPTYGDLNHLVSATMSGVTTCLRFPGQLNADLRKLAVNMVPFPRLHFFMPGFAPLTSRGSQQYRALTVPELTQQMFDSKNMMAACDPRHGRYLTVAAIFRGRMSMKEVDEQMLNVQNKNSSYFVEWIPNNVKTAVCDIPPRGLKMSATFIGNSTAIQELFKRISEQFTAMFRRKAFLHWYTGEGMDEMEFTEAESNMNDLVSEYQQYQDATADEQGEFEEEEGEDEA

SEQ ID NO: 168 - protein, 143 aa, Homo sapiens
MAMHFIFSDTAVLLFDFWSVHSPAGMALSVLVLLLLAVLYEGIKVGKAKLLNQVLVNLPTSISQQTIAETDGDSAGSDSFPVGRTHHRWYLCHFGQSLIHVIQVVIGYFIMLAVMSYNTWIFLGVVLGSAVGYYLAYPLLSTA

SEQ ID NO: 169 - protein, 445 aa, Homo sapiens
MGGVGEPGPREGPAQPGAPLPTFCWEQIRAHDQPGDKWLVIERRVYDISRWAQRHPGGSRLIGHHGAEDATDAFRAFHQDLNFVRKFLQPLLIGELAPEEPSQDGPLNAQLVEDFRALHQAAEDMKLFDASPTFFAFLLGHILAMEVLAWLLIYLLGPGWVPSALAAFILAISQAQSWCLQHDLGHASIFKKSWWNHVAQKFVMGQLKGFSAHWWNFRHFQHHAKPNIFHKDPDVTVAPVFLLGESSVEYGKKKRRYLPYNQQHLYFFLIGPPLLTLVNFEVENLAYMLVCMQWADLLWAASFYARFFLSYLPFYGVPGVLLFFVAVRVLESHWFVWITQMNHIPKEIGHEKHRDWVSSQLAATCNVEPSLFTNWFSGHLNFQIEHHLFPRMPRHNYSRVAPLVKSLCAKHGLSYEVKPFLTALVDIVRSLKKSGDIWLDAYLHQ

SEQ ID NO: 170 - protein, 3396 aa, Homo sapiens
MFINIKSILWMCSTLIVTHALHKVKVGKSPPVRGSLSGKVSLPCHFSTMPTLPPSYNTSEFLRIKWSKIEVDKNGKDLKETTVLVAQNGNIKIGQDYKGRVSVPTHPEAVGDASLTVVKLLASDAGLYRCDVMYGIEDTQDTVSLTVDGVVFHYRAATSRYTLNFEAAQKACLDVGAVIATPEQLFAAYEDGFEQCDAGWLADQTVRYPIRAPRVGCYGDKMGKAGVRTYGFRSPQETYDVYCYVDHLDGDVFHLTVPSKFTFEEAAKECENQDARLATVGELQAAWRNGFDQCDYGWLSDASVRHPVTVARAQCGGGLLGVRTLYRFENQTGFPPPDSRFDAYCFKPKEATTIDLSILAETASPSLSKEPQMVSDRTTPIIPLVDELPVIPTEFPPVGNIVSFEQKATVQPQAITDSLATKLPTPTGSTKKPWDMDDYSPSASGPLGKLDISEIKEEVLQSTTGVSHYATDSWDGVVEDKQTQESVTQIEQIEVGPLVTSMEILKHIPSKEFPVTETPLVTARMILESKTEKKMVSTVSELVTTGHYGFTLGEEDDEDRTLTVGSDESTLIFDQIPEVITVSKTSEDTIHTHLEDLESVSASTTVSPLIMPDNNGSSMDDWEERQTSGRITEEFLGKYLSTTPFPSQHRTEIELFPYSGDKILVEGISTVIYPSLQTEMTHRRERTETLIPEMRTDTYTDEIQEEITKSPFMGKTEEEVFSGMKLSTSLSEPIHVTESSVEMTKSFDFPTLITKLSAEPTEVRDMEEDFTATPGTTKYDENITTVLLAHGTLSVEAATVSKWSWDEDNTTSKPLESTEPSASSKLPPALLTTVGMNGKDKDIPSFTEDGADEFTLIPDSTQKQLEEVTDEDIAAHGKFTIRFQPTTSTGIAEKSTLRDSTTEEKVPPITSTEGQVYATMEGSALGEVEDVDLSKPVSTVPQFAHTSEVEGLAFVSYSSTQEPTTYVDSSHTIPLSVIPKTDWGVLVPSVPSEDEVLGEPSQDILVIDQTRLEATISPETMRTTKITEGTTQEEFPWKEQTAEKPVPALSSTAWTPKEAVTPLDEQEGDGSAYTVSEDELLTGSERVPVLETTPVGKIDHSVSYPPGAVTEHKVKTDEVVTLTPRIGPKVSLSPGPEQKYETEGSSTTGFTSSLSPFSTHITQLMEETTTEKTSLEDIDLGSGLFEKPKATELIEFSTIKVTVPSDITTAFSSVDRLHTTSAFKPSSAITKKPPLIDREPGEETTSDMVIIGESTSHVPPTTLEDIVAKETETDIDREYFTTSSPPATQPTRPPTVEDKEAFGPQALSTPQPPASTKFHPDINVYIIEVRENKTGRMSDLSVIGHPIDSESKEDEPCSEETDPVHDLMAEILPEFPDIIEIDLYHSEENEEEEEECANATDVTTTPSVQYINGKHLVTTVPKDPEAAEARRGQFESVAPSQNFSDSSESDTHPFVIAKTELSTAVQPNESTETTESLEVTWKPETYPETSEHFSGGEPDVFPTVPFHEEFESGTAKKGAESVTERDTEVGHQAHEHTEPVSLFPEESSGEIAIDQESQKIAFARATEVTFGEEVEKSTSVTYTPTIVPSSASAYVSEEEAVTLIGNPWPDDLLSTKESWVEATPRQVVELSGSSSIPITEGSGEAEEDEDTMFTMVTDLSQRNTTDTLITLDTSRIITESFFEVPATTIYPVSEQPSAKVVPTKFVSETDTSEWISSTTVEEKKRKEEEGTTGTASTFEVYSSTQRSDQLILPFELESPNVATSSDSGTRKSFMSLTTPTQSEREMTDSTPVFTETNTLENLGAQTTEHSSIHQPGVQEGLTTLPRSPASVFMEQGSGEAAADPETTTVSSFSLNVEYAIQAEKEVAGTLSPHVETTFSTEPTGLVLSTVMDRVVAENITQTSREIVISERLGEPNYGAEIRGFSTGFPLEEDFSGDFREYSTVSHPIAKEETVMMEGSGDAAFRDTQTSPSTVPTSVHISHISDSEGPSSTMVSTSAFPWEEFTSSAEGSGEQLVTVSSSVVPVLPSAVQKFSGTASSIIDEGLGEVGTVNEIDRRSTILPTAEVEGTKAPVEKEEVKVSGTVSTNFPQTIEPAKLWSRQEVNPVRQEIESETTSEEQIQEEKSFESPQNSPATEQTIFDSQTFTETELKTTDYSVLTTKKTYSDDKEMKEEDTSLVNMSTPDPDANGLESYTTLPEATEKSHFFLATALVTESIPAEHVVTDSPIKKEESTKHFPKGMRPTIQESDTELLFSGLGSGEEVLPTLPTESVNFTEVEQINNTLYPHTSQVESTSSDKIEDFNRMENVAKEVGPLVSQTDIFEGSGSVTSTTLIEILSDTGAEGPTVAPLPFSTDIGHPQNQTVRWAEEIQTSRPQTITEQDSNKNSSTAEINETTTSSTDFLARAYGFEMAKEFVTSAPKPSDLYYEPSGEGSGEVDIVDSFHTSATTQATRQESSTTFVSDGSLEKHPEVPSAKAVTADGFPTVSVMLPLHSEQNKSSPDPTSTLSNTVSYERSTDGSFQDRFREFEDSTLKPNRKKPTENIIIDLDKEDKDLILTITESTILEILPELTSDKNTIIDIDHTKPVYEDILGMQTDIDTEVPSEPHDSNDESNDDSTQVQEIYEAAVNLSLTEETFEGSADVLASYTQATHDESMTYEDRSQLDHMGFHFTTGIPAPSTETELDVLLPTATSLPIPRKSATVIPEIEGIKAEAKALDDMFESSTLSDGQAIADQSEIIPTLGQFERTQEEYEDKKHAGPSFQPEFSSGAEEALVDHTPYLSIATTHLMDQSVTEVPDVMEGSNPPYYTDTTLAVSTFAKLSSQTPSSPLTIYSGSEASGHTEIPQPSALPGIDVGSSVMSPQDSFKEIHVNIEATFKPSSEEYLHITEPPSLSPDTKLEPSEDDGKPELLEEMEASPTELIAVEGTEILQDFQNKTDGQVSGEAIKMFPTIKTPEAGTVITTADEIELEGATQWPHSTSASATYGVEAGVVPWLSPQTSERPTLSSSPEINPETQAALIRGQDSTIAASEQQVAARILDSNDQATVNPVEFNTEVATPPFSLLETSNETDFLIGINEESVEGTAIYLPGPDRCKMNPCLNGGTCYPTETSYVCTCVPGYSGDQCELDFDECHSNPCRNGATCVDGFNTFRCLCLPSYVGALCEQDTETCDYGWHKFQGQCYKYFAHRRTWDAAERECRLQGAHLTSILSHEEQMFVNRVGHDYQWIGLNDKMFEHDFRWTDGSTLQYENWRPNQPDSFFSAGEDCVVIIWHENGQWNDVPCNYHLTYTCKKGTVACGQPPVVENAKTFGKMKPRYEINSLIRYHCKDGFIQRHLPTIRCLGNGRWAIPKITCMNPSAYQRTYSMKYFKNSSSAKDNSINTSKHDHRWSRRWQESRR

SEQ ID NO: 171 - protein, 438 aa, Homo sapiens
MSPATTGTFLLTVYSIFSKVHSDRNVYPSAGVLFVHVLEREYFKGEFPPYPKPGEISNDPITFNTNLMGYPDRPGWLRYIQRTPYSDGVLYGSPTAENVGKPTIIEITAYNRRTFETARHNLIINIMSAEDFPLPYQAEFFIKNMNVEEMLASEVLGDFLGAVKNVWQPERLNAINITSALDRGGRVPLPINDLKEGVYVMVGADVPFSSCLREVENPQNQLRCSQEMEPVITCDKKFRTQFYIDWCKISLVDKTKQVSTYQEVIRGEGILPDGGEYKPPSDSLKSRDYYTDFLITLAVPSAVALVLFLILAYIMCCRREGVEKRNMQTPDIQLVHHSAIQKSTKELRDMSKNREIAWPLSTLPVFHPVTGEIIPPLHTDNYDSTNMPLMQTQQWSFAPVAQAGVQWRDLGSLQPPPPRNLPHQTQIPQQQTTGKWYP

SEQ ID NO: 172 - protein, 1581 aa, Homo sapiens
MRKRKISVCQQTWALLCKNFLKKWRMKRESLMEWLNSLLLLLCLYIYPHSHQVNDFSSLLTMDLGRVDTFNESRFSVVYTPVTNTTQQIMNKVASTPFLAGKEVLGLPDEESIKEFTANYPEEIVRVTFTNTYSYHLKFLLGHGMPAKKEHKDHTAHCYETNEDVYCEVSVFWKEGFVALQAAINAAIIEITTNHSVMEELMSVTGKNMKMHSFIGQSGVITDLYLFSCIISFSSFIYYASVNVTRERKRMKALMTMMGLRDSAFWLSWGLLYAGFIFIMALFLALVIRSTQFIILSGFMVVFSLFLLYGLSLVALAFLMSILVKKSFLTGLVVFLLTVFWGCLGFTSLYRHLPASLEWILSLLSPFAFMLGMAQLLHLDYDLNSNAFPHPSDGSNLIVATNFMLAFDTCLYLALAIYFEKILPNEYGHRRPPLFFLKSSFWSQTQKTDHVALEDEMDADPSFHDSFEQAPPEFQGKEAIRIRNVTKEYKGKPDKIEALKDLVFDIYEGQITAILGHSGAGKSTLLNILSGLSVPTKGSVTIYNNKLSEMADLENLSKLTGVCPQSNVQFDFLTVRENLRLFAKIKGILPQEVDKEIFLLDEPTAGLDPFSRHQVWNLLKERKTDRVILFSTQFMDEADILADRKVFLSQGKLKCAGSSLFLKKKWGIGYHLSLQLNEICVEENITSLVKQHIPDAKLSAKSEGKLIYTLPLERTNKFPELYKDLDSYPDLGIENYGVSMTTLNEVFLKLEGKSTINESDIAILGEVQAEKADDTERLVEMEQVLSSLNKMRKTIGGVALWRQQICAIARVRLLKLKHERKALLALLLILMAGFCPLLVEYTMVKIYQNSYTWELSPHLYFLAPGQQPHDPLTQLLIINKTGASIDDFIQSVEHQNIALEVDAFGTRNGTDDPSYNGAITVCCNEKNYSFSLACNAKRLNCFPVLMDIVSNGLLGMVKPSVHIRTERSTFLENGQDNPIGFLAYIMFWLVLTSSCPPYIAMSSIDDYKNRARSQLRISGLSPSAYWFGQALVDVSLYFLVFVFIYLMSYISNFEDMLLTIIHIIQIPCAVGYSFSLIFMTYVISFIFRKGRKNSGIWSFCFYVVTVFSVAGFAFSIFESDIPFIFTFLIPPATMIGCLFLSSHLLFSSLFSEERMDVQPFLVFLIPFLHFIIFLFTLRCLEWKFGKKSMRKDPFFRISPRSSDVCQNPEEPEGEDEDVQMERVRTANALNSTNFDEKPVIIASCLRKEYAGKRKGCFSKRKNKIATRNVSFCVRKGEVLGLLGHNGAGKSTSIKVITGDTKPTAGQVLLKGSGGGDALEFLGYCPQENALWPNLTVRQHLEVYAAVKGLRKGDAEVAITRLVDALKLQDQLKSPVKTLSEGIKRKLCFVLSILGNPSVVLLDEPSTGMDPEGQQQMWQAIRATFRNTERGALLTTHYMAEAEAVCDRVAIMVSGRLRCIGSIQHLKSKFGKDYLLEMKVKNLAQVEPLHAEILRLFPQAARQERYSSLMVYKLPVEDVQPLAQAFFKLEKVKQSFDLEEYSLSQSTLEQVFLELSKEQELGDFEEDFDPSVKWKLLPQEEP

SEQ ID NO: 173 - protein, 174 aa, Homo sapiens
MAAAAELSLLEKSLGLSKGNKYSAQGERQIPVLQTNNGPSLTGLTTIAAHLVKQANKEYLLGSTAEEKAIVQQWLEYRVTQVDGHSSKNDIHTLLKDLNSYLEDKVYLTGYNFTLADILLYYGLHRFIVDLTVQEKEKYLNVSRWFCHIQHYPGIRQHLSSVVFIKNRLYTNSH

SEQ ID NO: 174 - protein, 333 aa, Homo sapiens
MAAGCCGVKKQKLSSSPPSGSGGGGGASSSSHCSGESQCRAGELGLGGAGTRLNGLGGLTGGGSGSGCTLSPPQGCGGGGGGIALSPPPSCGVGTLLSTPAAATSSSPSSSSAASSSSPGSRKMVVSAEMCCFCFDVLYCHLYGYQQPRTPRFTNEPYPLFVTWKIGRDKRLRGCIGTFSAMNLHSGLREYTLTSALKDSRFPPMTRDELPRLFCSVSLLTNFEDVCDYLDWEVGVHGIRIEFINEKGSKRTATYLPEVAKEQGWDHIQTIDSLLRKGGYKAPITNEFRKTIKLTRYRSEKMTLSYAEYLAHRQHHHFQNGIGHPLPPYNHYS

SEQ ID NO: 175 - protein, 155 aa, Homo sapiens
MAEGEITTFAALTERFNLPLGNYKKPKLLYCSNGGHFLRILPDGTVDGTRDRSDQHIQLQLSAESAGEVYIKGTETGQYLAMDTEGLLYGSQTPNEECLFLERLEENHYNTYTSKKHAEKNWFVGLKKNGSCKRGPRTHYGQKAILFLPLPVSSD

SEQ ID NO: 176 - protein, 147 aa, Homo sapiens
MVMGLGVLLLVFVLGLGLTPPTLAQDNSRYTHFLTQHYDAKPQGRDDRYCESIMRRRGLTSPCKDINTFIHGNKRSIKAICENKNGNPHRENLRISKSSFQVTTCKLHGGSPWPPCQYRATAGFRNVVVACENGLPVHLDQSIFRRP

SEQ ID NO: 177 - protein, 200 aa, Homo sapiens
ANKGPSYGMSREVQSKIEKKYDEELEERLVEWIIVQCGPDVGRPDRGRLGFQVWLKNGVILSKLVNSLYPDGSKPVKVPENPPSMVFKQMEQVAQFLKAAEDYGVIKTDMFQTVDLFEGKDMAAVQRTLMALGSLAVTKNDGHYRGDPNWFMKKAQEHKREFTESQLQEGKHVIGLQMGSNRGASQAGMTGYGRPRQIIS

SEQ ID NO: 178 - protein, 100 aa, Homo sapiens [sequence omitted]

SEQ ID NO: 179 - protein, 61 aa, Homo sapiens
MDPNCSCSPVGSCACAGSCKCKECKCTSCKKSCCSCCPVGCAKCAQGCICKGTSDKCSCCA

SEQ ID NO: 180 - protein, 2025 aa, Homo sapiens
MDNFAEGDFTVADYALLEDCPHVDDCVFAAEFMSNDYVRVTQLYCDGVGVQYKDYIQSERNLEFDICSIWCSKPISVLQDYCDAIKINIFWPLLFQHQNSSVISRLHPCVDANNSRASEINLKKLQHLELMEDIVDLAKKVANDSFLIGGLLRIGCKIENKILAMEEALNWIKYAGDVTILTKLGSIDNCWPMLSIFFTEYKYHITKIVMEDCNLLEELKTQSCMDCIEEGELMKMKGNEEFSKERFDIAIIYYTRAIEYRPENYLLYGNRALCFLRTGQFRNALGDGKRATILKNTWPKGHYRYCDALSMLGEYDWALQANIKAQKLCKNDPEGIKDLIQQHVKLQKQIEDLQGRTANKDPIKAFYENRAYTPRSLSAPIFTTSLNFVEKERDFRKINHEMANGGNQNLKVADEALKVDDCDCHPEFSPPSSQPPKHKGKQKSRNNESEKFSSSSPLTLPADLKNILEKQFSKSSRAAHQDFANIMKMLRSLIQDGYMALLEQRCRSAAQAFTELLNGLDPQKIKQLNLAMINYVLVVYGLAISLLGIGQPEELSEAENQFKRIIEHYPSEGLDCLAYCGIGKVYLKKNRFLEALNHFEKARTLIYRLPGVLTWPTSNVIIEESQPQKIKMLLEKFVEECKFPPVPDAICCYQKCHGYSKIQIYITDPDFKGFIRISCCQYCKIEFHMNCWKKLKTTTFNDKIDKDFLQGICLTPDCEGVISKIIIFSSGGEVKCEFEHKVIKEKVPPRPILKQKCSSLEKLRLKEDKKLKRKIQKKEAKKLAQERMEEDLRESNPPKNEEQKETVDNVQRCQFLDDRILQCIKQYADKIKSGIQNTAMLLKELLSWKVLSTEDYTTCFSSRNFLNEAVDYVIRHLIQENNRVKTRIFLHVLSELKEVEPKLAAWIQKLNSFGLDATGTFFSRYGASLKLLDFSIMTFLWNEKYGHKLDSIEGKQLDYFSEPASLKEARCLIWLLEEHRDKFPALHSALDEFFDIMDSRCTVLRKQDSGEAPFSSTKVKNKSKKKKPKDSKPMLVGSGTTSVTSNNEIITSSEDHSNRNSDSAGPFAVPDHLRQDVEEFEALYDQHSNEYVVRNKKLWDMNPKQKCSTLYDYFSQFLEEHGPLDMSNKMFSAEYEFFPEETRQILEKAGGLKPFLLGCPRFVVIDNCIALKKVASRLKKKRKKKNIKTKVEEISKAGEYVRVKLQLNPAAREFKPDVKSKPVSDSSSAPAFENVKPKPVSANSPKPACEDVKAKPVSDNSSRQVSEDGQPKGVSSNSPKPGSEDANYKRVSCNSPKPVLEDVKPTYWAQSHLVTGYCTYLPFQRFDITQTPPAYINVLPGLPQYTSIYTPLASLSPEYQLPRSVPVVPSFVANDRADKNAAAYFEGHHLNAENVAGHQIASETQILEGSLGISVKSHCSTGDAHTVLSESNRNDEHCGNSNNKCEVIPESTSAVTNIPHVQMVAIQVSWNIIHQEVNTEPYNPFEERQGEISRIEKEHQVLQDQLQEVYENYEQIKLKGLEETRDLEEKLKRHLEENKISKTELDWFLQDLEREIKKWQQEKKEIQERLKSLKKKIKKVSNASEMYTQKNDGKEKEHELHLDQSLEISNTLTNEKMKIEEYIKKGKEDYEESHQRAVAAEVSVLENWKESEVYKLQIMESQAEAFLKKLGLISRDPAAYPDMESDIRSWELFLSNVTKEIEKAKSQFEEQIKAIKNGSRLSELSKVQISELSFPACNTVHPELLPESSGHDGQGLVTSASDVTGNHAALHRDPSVFSAGDSPGEAPSALLPGPPPGQPEATQLTGPKRAGQAALSERSPVADRKQPVPPGRAARSSQSPKKPFNSIIEHLSVVFPCYNSTELAGFIKKVRSKNKNSLSGLSIDEIVQRVTEHILDEQKKKKPNPGKDKRTYEPSSATPVTRSSQGSPSVVVAPSPKTKGQKAEDVPVRIALGASSCEICHEVFKSKNVRVLKCGHKYHKGCFKQWLKGQSACPACQGRDLLTEESPSGRGWPSQNQELPSCSSR

SEQ ID NO: 181 - protein, 864 aa, Homo sapiens
QVQHGSNVNIHRLVEGNVVIWENASTPLYTGAIVTNNDGPYMAYVEVLGDPNLQFFIKSGDAWVTLSEHEYLAKLQEIRQAVHIESVFSLNMAFQLENNKYEVETHAKNGANMVTFIPRNGHICKMVYHKNVRIYKATGNDTVTSVVGFFRGLRLLLINVFSIDDNGMMSNRYFQHVDDKYVPISQKNYETGIVKLKDYKHAYHPVDLDIKDIDYTMFHLADATYHEPCFKIIPNTGFCITKLFDGDQVLYESFNPLIHCINEVHIYDRNNGSIICLHLNYSPPSYKAYLVLKDTGWEATTHPLLEEKIEELQDQRACELDVNFISDKDLYVAALTNADLNYTMVTPRPHRDVIRVSDGSEVLWYYEGLDNFLVCAWIYVSDGVASLVHLRIKDRIPANNDIYVLKGDLYWTRITKIQFTQEIKRLVKKSKKKLAPITEEDSDKHDEPPEGPGASGLPPKAPGDKEGSEGHKGPSKGSDSSKEGKKPGSGKKPGPAREHKPSKIPTLSKKPSGPKDPKHPRDPKEPRKSKSPRTASPTRRPSPKLPQLSKLPKSTSPRSPPPPTRPSSPERPEGTKIIKTSKPPSPKPPFDPSFKEKFYDDYSKAASRSKETKTTVVLDESFESILKETLPETPGTPFTTPRPVPPKRPRTPESPFEPPKDPDSPSTSPSEFFTPPESKRTRFHETPADTPLPDVTAELFKEPDVTAETKSPDEAMKRPRSPSEYEDTSPGDYPSLPMKRHRLERLRLTTTEMETDPGRMAKDASGKPVKLKRSKSFDDLTTVELAPEPKASRIVVDDEGTEADDEETHPPEERQKTEVRRRRPPKKPSKSPRPSKPKKPKKPDSAYIPSILAILVVSLIVGIL

SEQ ID NO: 182 - protein, 453 aa, Homo sapiens
MGSVLGLCSMASWIPCLCGSAPCLLCRCCPSGNNSTVTRLIYALFLLVGVCVACVMLIPGMEEQLNKIPGFCENEKGVVPCNILVGYKAVYRLCFGLAMFYLLLSLLMIKVKSSSDPRAAVHNGFWFFKFAAAIAIIIGAFFIPEGTFTTVWFYVGMAGAFCFILIQLVLLIDFAHSWNESWVEKMEEGNSRCWYAALLSATALNYLLSLVAIVLFFVYYTHPASCSENKAFISVNMLLCVGASVMSILPKIQESQPRSGLLQSSVITVYTMYLTWSAMTNEPETNCNPSLLSIIGYNTTSTVPKEGQSVQWWHAQGIIGLILFLLCVFYSSIRTSNNSQVNKLTLTSDESTLIEDGGARSDGSLEDGDDVHRAVDNERDGVTYSYSFFHFMLFLASLYIMMTLTNWYRYEPSREMKSQWTAVWVKISSSWIGIVLYVWTLVAPLVLTNRDFD

SEQ ID NO: 183 - protein, 1224 aa, Homo sapiens
MLTKFETKSARVKGLSFHPKRPWILTSLHNGVIQLWDYRMCTLIDKFDEHDGPVRGIDFHKQQPLFVSGGDDYKIKVWNYKLRRCLFTLLGHLDYIRTTFFHHEYPWILSASDDQTIRVWNWQSRTCVCVLTGHNHYVMCAQFHPTEDLVVSASLDQTVRVWDISGLRKKNLSPGAVESDVRGITGVDLFGTTDAVVKHVLEGHDRGVNWAAFHPTMPLIVSGADDRQVKIWRMNESKAWEVDTCRGHYNNVSCAVFHPRQELILSNSEDKSIRVWDMSKRTGVQTFRRDHDRFWVLAAHPNLNLFAAGHDGGMIVFKLERERPAYAVHGNMLHYVKDRFLRQLDFNSSKDVAVMQLRSGSKFPVFNMSYNPAENAVLLCTRASNLENSTYDLYTIPKDADSQNPDAPEGKRSSGLTAVWVARNRFAVLDRMHSLLIKNLKNEITKKVQVPNCDEIFYAGTGNLLLRDADSITLFDVQQKRTLASVKISKVKYVIWSADMSHVALLAKHAIVICNRKLDALCNIHENIRVKSGAWDESGVFIYTTSNHIKYAVTTGDHGIIRTLDLPIYVTRVKGNNVYCLDRECRPRVLTIDPTEFKFKLALINRKYDEVLHMVRNAKLVGQSIIAYLQKKGYPEVALHFVKDEKTRFSLALECGNIEIALEAAKALDDKNCWEKLGEVALLQGNHQIVEMCYQRTKNFDKVSFLYLITGNLEKLRKMMKIAEIRKDMSGHYQNALYLGDVSERVRILKNCGQKSLAYLTAATHGLDEEAESLKETFDPEKETIPDIDPNAKLLQPPAPIMPLDTNWPLLTVSKGFFEGTIASKGKGGALAADIDIDTVGTEGWGEDAELQLDEDGFVEATEGLGDDALGKGQEEGGGWDVEEDLELPPELDISPGAAGGAEDGFFVPPTKGTSPTQIWCNNSQLPVDHILAGSFETAMRLLHDQVGVIQFGPYKQLFLQTYARGRTTYQALPCLPSMYGYPNRNWKDAGLKNGVPAVGLKLNDLIQRLQLCYQLTTVGKFEEAVEKFRSILLSVPLLVVDNKQEIAEAQQLITICREYIVGLSVETERKKLPKETLEQQKRICEMAAYFTHSNLQPVHMILVLRTALNLFFKLKNFKTAATFARRLLELGPKPEVAQQTRKILSACEKNPTDAYQLNYDMHNPFDICAASYRPIYRGKPVEKCPLSGACYSPEFKGQICRVTTVTEIGKDVIGLRISPLQFR

SEQ ID NO: 184 - protein, 329 aa, Homo sapiens
MTTQQIDLQGPGPWGFRLVGGKDFEQPLAISRVTPGSKAALANLCIGDVITAIDGENTSNMTHLEAQNRIKGCTDNLTLTVARSEHKVWSPLVTEEGKRHPYKMNLASEPQEVLHIGSAHNRSAMPFTASPASSTTARVITNQYNNPAGLYSSENISNFNNALESKTAASGVEANSRPLDHAQPPSSLVIDKESEVYKMLQEKQELNEPPKQSTSFLVLQEILESEEKGDPNKPSGFRSVKAPVTKVAASIGNAQKLPMCDKCGTGIVGVFVKLRDRHRHPECYVCTDCGTNLKQKGHFFVEDQIYCEKHARERVTPPEGYEVVTVFPK

SEQ ID NO: 185 - protein, 567 aa, Homo sapiens
MGRGLLRGLWPLHIVLWTRIASTIPPHVQKSVNNDMIVTDNNGAVKFPQLCKFCDVRFSTCDNQKSCMSNCSITSICEKPQEVCVAVWRKNDENITLETVCHDPKLPYHDFILEDAASPKCIMKEKKKPGETFFMCSCSSDECNDNIIFSEEYNTSNPDLLLVIFQVTGISLLPPLGVAISVIIIFYCYRVNRQQKLSSTWETGKTRKLMEFSEHCAIILEDDRSDISSTCANNINHNTELLPIELDTLVGKGRFAEVYKAKLKQNTSEQFETVAVKIFPYEEYASWKTEKDIFSDINLKHENILQFLTAEERKTELGKQYWLITAFHAKGNLQEYLTRHVISWEDLRKLGSSLARGIAHLHSDHTPCGRPKMPIVHRDLKSSNILVKNDLTCCLCDFGLSLRLDPTLSVDDLANSGQVGTARYMAPEVLESRMNLENAESFKQTDVYSMALVLWEMTSRCNAVGEVKDYEPPFGSKVREHPCVESMKDNVLRDRGRPEIPSFWLNHQGIQMVCETLTECWDHDPEARLTAQCVAERFSELEHLDRLSGRSCSEEKIPEDGSLNTTK

SEQ ID NO: 186 - protein, 479 aa, Homo sapiens
MMRTPRPRQALHFWTAPDFPPWPLHALQSTFLLSCSLVVLPLYRSSKDTLSGCIMSSPLLLPFRLLLMANVADTKLYDILGVPPGASENELKKAYRKLAKEYHPDKNPNAGDKFKEISFAYEVLSNPEKRELYDRYGEQGLREGSGGGGGMDDIFSHIFGGGLFGFMGNQSRSRNGRRRGEDMMHPLKVSLEDLYNGKTTKLQLSKNVLCSACSGQGGKSGAVQKCSACRGRGVRIMIRQLAPGMVQQMQSVCSDCNGEGEVINEKDRCKKCEGKKVIKEVKILEVHVDKGMKHGQRITFTGEADQAPGVEPGDIVLLLQEKEHEVFQRDGNDLHMTYKIGLVEALCGFQFTFKHLDGRQIVVKYPPGKVIEPGCVRVVRGEGMPQYRNPFEKGDLYIKFDVQFPENNWINPDKLSELEDLLPSRPEVPNIIGETEEVELQEFDSTRGSGGGQRREAYNDSSDEESSSHHGPGVQCAHQ

SEQ ID NO: 187 - protein, 570 aa, Homo sapiens
MNVVFAVKQYISKMIEDSGPGMKVLLMDKETTGIVSMVYTQSEILQKEVYLFERIDSQNREIMKHLKAICFLRPTKENVDYIIQELRRPKYTIYFIYFSNVISKSDVKSLAEADEQEVVAEVQEFYGDYIAVNPHLFSLNILGCCQGRNWDPAQLSRTTQGLTALLLSLKKCPMIRYQLSSEAAKRLAECVKQVITKEYELFEFRRTEVPPLLLILDRCDDAITPLLNQWTYQAMVHELLGINNNRIDLSRVPGISKDLREVVLSAENDEFYANNMYLNFAEIGSNIKNLMEDFQKKKPKEQQKLESIADMKAFVENYPQFKKMSGTVSKHVTVVGELSRLVSERNLLEVSEVEQELACQNDHSSALQNIKRLLQNPKVTEFDAARLVMLYALHYERHSSNSLPGLMMDLRNKGVSEKYRKLVSAVVEYGGKRVRGSDLFSPKDAVAITKQFLKGLKGVENVYTQHQPFLHETLDHLIKGRLKENLYPYLGPSTLRDRPQDIIVFVIGGATYEEALTVYNLNRTTPGVRIVLGGTTVHNTKSFLEEVLASGLHSRSKESSQVTSRSASRR

SEQ ID NO: 188 - protein, 603 aa, Homo sapiens
ARRGWLGRRGWRGSRAAAMGSLKEELLKAIWHAFTALDQDHSGKVSKSQLKVLSHNLCTVLKVPHDPVALEEHFRDDDEGPVSNQGYMPYLNRFILEKVQDNFDKIEFNRMCWTLCVKKNLTKNPLLITEEDAFKIWVIFNFLSEDKYPLIIVSEEIEYLLKKLTEAMGGGWQQEQFEHYKINFDDSKNGLSAWELIELIGNGQFSKGMDRQTVSMAINEVFNELILDVLKQGYMMKKGHRRKNWTERWFVLKPNIISYYVSEDLKDKKGDILLDENCCVESLPDKDGKKCLFLVKCFDKTFEISASDKKKKQEWIQAIHSTIHLLKLGSPPPHKEARQRRKELRKKQLAEQEELERQMKELQAANESKQQELEAVRKKLEEAASRAAEEEKKRLQTQVELQARFSTELEREKLIRQQMEEQVAQKSSELEQYLQRVRELEDMYLKLQEALEDERQARQDEETVRKLQARLLEEESSKRAELEKWHLEQQQAIQTTEAEKQELENQRVLKEQALQEAMEQLEELELERKQALEQYEEVKKKLEMATNKTKSWKDKVAHHEGLIRLIEPGSKNPHLITNWGPAAFTEAELEEREKNWKEKKTTE

SEQ ID NO: 189 - protein, 119 aa, Homo sapiens
MDKNIGEQLNKAYEAFRQACMDRDSAVKELQQKTENYEQRIREQQEQLSLQQTIIDKLKSQLLLVNSTQDNNYGCVPLLEDSETRKNNLTLDQPQDKVISGIAREKLPKVDIASAESSI

SEQ ID NO: 190 - protein, 274 aa, Homo sapiens
MPRAEPRATLGEQEKAGLPLGAWRLYLLRHFRKQTELRRSGSRDVTGALLVAAAVASEAVGSLRVAEGGPNTLLLQVLRSWPWCNKELKTMEERKVKRRSPKSFSAHCTQVVNAKKNAIPVSKSTGFSNPASQSTSQRPKLKRVMKEKTKPQGGEGKGAQSTPIQHSFLTDVSDVQEMERGLLSLLNDFHSGKLQAFGNECSIEQMEHVRGMQEKLARLNLELYGELEELPEDKRKTASDSNLDRLLSDLEELNSSIQKLHLADAQDVPNTSAS

SEQ ID NO: 191 - protein, 364 aa, Homo sapiens [sequence omitted]

SEQ ID NO: 192 - protein, 158 aa, Homo sapiens
MMRFMLLFSRQGKLRLQKWYLATSDKERKKMVRELMQVVLARKPKMCSFLEWRDLKVVYKRYASLYFCCAIEGQDNELITLELIHRYVELLDKYFGSVCELDIIFNFEKAYFILDEFLMGGDVQDTSKKSVLKAIEQADLLQEEDESPRSVLEEMGLA

SEQ ID NO: 193 - protein, 93 aa, Homo sapiens
MNAKVVVVLVLVLTALCLSDGKPVSLSYRCPCRFFESHVARANVKHLKILNTPNCALQIVARLKNNNRQVCIDPKLKWIQEYLEKALNKRFKM

SEQ ID NO: 194 - protein, 256 aa, Homo sapiens
MAAAVGRLLRASVARHVSAIPWGISATAALRPAACGRTSLTNLLCSGSSQAKLFSTSSSCHAPAVTQHAPYFKGTAVVNGEFKDLSLDDFKGKYLVLFFYPLDFTFVCPTEIVAFSDKANEFHDVNCEVVAVSVDSHFSHLAWINTPRKNGGLGHMNIALLSDLTKQISRDYGVLLEGSGLALRGLFIIDPNGVIKHLSVNDLPVGRSVEETLRLVKAFQYVETHGEVCPANWTPDSPTIKPSPAASKEYFQKVNQ

SEQ ID NO: 195 - protein, 320 aa, Homo sapiens
MPKKKTGARKKAENRREREKQLRASRSTIDLAKHPCNASMECDKCQRRQKNRAFCYFCNSVQKLPICAQCGKTKCMMKSSDCVIKHAGVYSTGLAMVGAICDFCEAWVCHGRKCLSTHACACPLTDAECVECERGVWDHGGRIFSCSFCHNFLCEDDQFEHQASCQVLEAETFKCVSCNRLGQHSCLRCKACFCDDHTRSKVFKQEKGKQPPCPKCGHETQETKDLSMSTRSLKFGRQTGGEEGDGASGYDAYWKNLSSDKYGDTSYHDEEEDEYEAEDDEEEEDEGRKDSDTESSDLFTNLNLGRTYASGYAHYEEQEN

SEQ ID NO: 196 - protein, 538 aa, Homo sapiens
MEESVNQMQPLNEKQIANSQDGYVWQVTDMNRLHRFLCFGSEGGTYYIKEQKLGLENAEALIRLIEDGRGCEVIQEIKSFSQEGRTTKQEPMLFALAICSQCSDISTKQAAFKAVSEVCRIPTHLFTFIQFKKDLKESMKCGMWGRALRKAIADWYNEKGGMALALAVTKYKQRNGWSHKDLLRLSHLKPSSEGLAIVTKYITKGWKEVHELYKEKALSVETEKLLKYLEAVEKVKRTKDELEVIHLIEEHRLVREHLLTNHLKSKEVWKALLQEMPLTALLRNLGKMTANSVLEPGNSEVSLVCEKLCNEKLLKKARIHPFHILIALETYKTGHGLRGKLKWRPDEEILKALDAAFYKTFKTVEPTGKRFLLAVDVSASMNQRVLGSILNASTVAAAMCMVVTRTEKDSYVVAFSDEMVPCPVTTDMTLQQVLMAMSQIPAGGTDCSLPMIWAQKTNTPADVFIVFTDNETFAGGVHPAIALREYRKKMDIPAKLIVCGMTSNGFTIADPDDRGMLDMCGFDTGALDVIRNFTLDMI

SEQ ID NO: 197 - protein, 445 aa, Homo sapiens
MALVDKHKVKRQRLDRICEGIRPQIMNGPLHPRPLVALLDGRDCTVEMPILKDLATVAFCDAQSTQEIHEKVLNEAVGAMMYHTITLTREDLEKFKALRVIVRIGSGYDNVDIKAAGELGIAVCNIPSAAVEETADSTICHILNLYRRNTWLYQALREGTRVQSVEQIREVASGAARIRGETLGLIGFGRTGQAVAVRAKAFGFSVIFYDPYLQDGIERSLGVQRVYTLQDLLYQSDCVSLHCNLNEHNHHLINDFTIKQMRQGAFLVNAARGGLVDEKALAQALKEGRIRGAALDVHESEPFSFAQGPLKDAPNLICTPHTAWYSEQASLEMREAAATEIRRAITGRIPESLRNCVNKEFFVTSAPWSVIDQQAIHPELNGATYRYPPGIVGVAPGGLPAAMEGIIPGGIPVTHNLPTVAHPSQAPSPNQPTKHGDNREHPNEQ

SEQ ID NO: 198 - protein, 875 aa, Homo sapiens
MEKLHQCYWKSGEPQSDDIEASRMKRAAAKHLIERYYHQLTEGCGNEACTNEFCASCPTFLRMDNNAAAIKALELYKINAKLCDPHPSKKGASSAYLENSKGAPNNSCSEIKMNKKGARIDFKDVTYLTEEKVYEILELCREREDYSPLIRVIGRVFSSAEALVQSFRKVKQHTKEELKSLQAKDEDKDEDEKEKAACSAAAMEEDSEASSSRIGDSSQGDNNLQKLGPDDVSVDIDAIRRVYTRLLSNEKIETAFLNALVYLSPNVECDLTYHNVYSRDPNYLNLFIIGMENRNLHSPEYLEMALPLFCKAMSKLPLAAQGKLIRLWSKYNADQIRRMMETFQQLITYKVISNEFNSRNLVNDDDAIVAASKCLKMVYYANVVGGEVDTNHNEEDDEEPIPESSELTLQELLGEERRNKKGPRVDPLETELGVKTLDCRKPLIPFEEFINEPLNEVLEMDKDYTFFKVETENKFSFMTCPFILNAVTKNLGLYYDNRIRMYSERRITVLYSLVQGQQLNPYLRLKVRRDHIIDDALVRLEMIAMENPADLKKQLYVEFEGEQGVDEGGVSKEFFQLVVEEIFNPDIGMFTYDESTKLFWFNPSSFETEGQFTLIGIVLGLAIYNNCILDVHFPMVVYRKLMGKKGTFRDLGDSHPVLYQSLKDLLEYEGNVEDDMMITFQISQTDLFGNPMMYDLKENGDKIPITNENRKEFVNLYSDYILNKSVEKQFKAFRRGFHMVTNESPLKYLFRPEEIELLICGSRNLDFQALEETTEYDGGYTRDSVLIREFWEIVHSFTDEQKRLFLQFTTGTDRAPVGGLGKLKMIIAKNGPDTERLPTSHTCFNVLLLPEYSSKEKLKERLLKAITYAKGFGML

SEQ ID NO: 199 - protein, 192 aa, Homo sapiens
GKQNSKLRPEVMQDLLESTDFTEHEIQEWYKGFLRDCPSGHLSMEEFKKIYGNFFPYGDASKFAEHVFRTFDANGDGTIDFREFIIALSVTSRGKLEQKLKWAFSMYDLDGNGYISKAEMLEIVQAIYKMVSSVMKMPEDESTPEKRTEKIFRQMDTNRDGKLSLEEFIRGAKSDPSIVRLLQCDPSSAGQF

SEQ ID NO: 200 - protein, 359 aa, Homo sapiens
MKATIILLLLAQVSWAGPFQQRGLFDFMLEDEASGIGPEVPDDRDFEPSLGPVCPFRCQCHLRVVQCSDLGLDKVPKDLPPDTTLLDLQNNKITEIKDGDFKNLKNLHALILVNNKISKVSPGAFTPLVKLERLYLSKNQLKELPEKMPKTLQELRAHENEITKVRKVTFNGLNQMIVIELGTNPLKSSGIENGAFQGMKKLSYIRIADTNITSIPQGLPPSLTELHLDGNKISRVDAASLKGLNNLAKLGLSFNSISAVDNGSLANTPHLRELHLDNNKLTRVPGGLAEHKYIQVVYLHNNNISVVGSSDFCPPGHNTKKASYSGVSLFSNPVQYWEIQPSTFRCVYVRSAIQLGNYK

SEQ ID NO: 201 - protein, 207 aa, Homo sapiens
MTSRKKVLLKVIILGDSGVGKTSLMNQYVNKKFSNQYKATIGADFLTKEVMVDDRLVTMQIWDTAGQERFQSLGVAFYRGADCCVLVFDVTAPNTFKTLDSWRDEFLIQASPRDPENFPFVVLGNKIDLENRQVATKRAQAWCYSKNNIPYFETSAKEAINVEQAFQTIARNALKQETEVELYNEFPEPIKLDKNDRAKASAESCSC

SEQ ID NO: 202 - protein, 190 aa, Homo sapiens
MFQVPDSEGGRAGSRAMKPPGGESSNLFGSPEEATPSSRPNRMASNIFGPTEEPQNIPKRTNPPGGKGSGIFDESTPVQTRQHLNPPGGKTSDIFGSPVTATSRLAHPNKPKDHVFLCEGEEPKSDLKAARSIPAGAEPGEKGSARKAGPAKEQEPMPTVDSHEPRLGPRPRSHNKVLNPPGGKSSISFY

SEQ ID NO: 203 - protein, 864 aa, Homo sapiens; identical to SEQ ID NO: 181

SEQ ID NO: 204 - protein, 1355 aa, Homo sapiens
DTDLFMECEEEELEPWQKISDVIEDSVVEDYNSVDKTTTAGNPLVQQGGQPLILTQNPAPGLGTMVTQPVLRPVQVMQNANHVTSSPVASQPIFITTQGFPVRNVRPVQNAMNQVGIVLNVQQGQTVRPITLVPAPGTQFVKPTVGVPQVFSQMTPVRPGSTMPVRPTTNTFTTVIPATLTIRSTVPQSQSQQTKSTPSTSTTPTATQPTSLGQLAVQSPGQSNQTTNPKLAPSFPSPPAVSIASFVTVKRPGVTGENSNEVAKLVNTLNTIPSLGQSPGPVVVSNNSSAHGSQRTSGPESSMKVTSSIPVFDLQDGGRKICPRCNAQFRVTEALRGHMCYCCPEMVEYQKKGKSLDSEPSVPSAAKPPSPEKTAPVASTPSSTPIPALSPPTKVPEPNENVGDAVQTKLIMLVDDFYYGRDGGKVAQLTNFPKVATSFRCPHCTKRLKNNIRFMNHMKHHVELDQQNGEVDGHTICQHCYRQFSTPFQLQCHLENVHSPYESTTKCKICEWAFESEPLFLQHMKDTHKPGEMPYVCQVCQYRSSLYSEVDVHFRMIHEDTRHLLCPYCLKVFKNGNAFQQHYMRHQKRNVYHCNKCRLQFLFAKDKIEHKLQHHKTFRKPKQLEGLKPGTKVTIRASRGQPRTVPVSSNDTPPSALQEAAPLTSSMDPLPVFLYPPVQRSIQKRAVRKMSVMGRQTCLECSFEIPDFPNHFPTYVHCSLCRYSTCCSRAYANHMINNHVPRKSPKYLALFKNSVSGIKLACTSCTFVTSVGDAMAKHLVFNPSHRSSSILPRGLTWIAHSRHGQTRDRVHDRNVKNMYPPPSFPTNKAATVKSAGATPAEPEELLTPLAPALPSPASTATPPPTPTHPQALALPPLATEGAECLNVDDQDEGSPVTQEPELASGGGGSGGVGKKEQLSVKKLRVVLFALCCNTEQAAEHFRNPQRRIRRWLRRFQASQGENLEGKYLSFEAEEKLAEWVLTQREQQLPVNEETLFQKATKIGRSLEGGFKISYEWAVRFMLRHHLTPHARRAVAHTLPKDVAENAGLFIDFVQRQIHNQDLPLSMIVAIDEISLFLDTEVLSSDDRKENALQTVGTGEPWCDVVLAILADGTVLPTLVFYRGQMDQPANMPDSILLEAKESGYSDDEIMELWSTRVWQKHTACQRSKGMLVMDCHRTHLSEEVLAMLSASSTLPAVVPAGCSSKIQPLDVCIKRTVKNFLHKKWKEQAREMADTACDSDVLLQLVLVWLGEVLGVIGDCPELVQRSFLVASVLPGPDGNINSPTRNADMQEELIASLEEQLKLSGEHSESSTPRPRSSPEETIEPESLHQLFEGESETESFYGFEEADLDLMEI

SEQ ID NO: 205 - protein, 864 aa, Homo sapiens; identical to SEQ ID NO: 181

SEQ ID NO: 206 - protein, 2386 aa, Homo sapiens
MLRGPGPGLLLLAVQCLGTAVPSTGASKSKRQAQQMVQPQSPVAVSQSKPGCYDNGKHYQINQQWERTYLGNALVCTCYGGSRGFNCESKPEAEETCFDKYTGNTYRVGDTYERPKDSMIWDCTCIGAGRGRISCTIANRCHEGGQSYKIGDTWRRPHETGGYMLECVCLGNGKGEWTCKPIAEKCFDHAAGTSYVVGETWEKPYQGWMMVDCTCLGEGSGRITCTSRNRCNDQDTRTSYRIGDTWSKKDNRGNLLQCICTGNGRGEWKCERHTSVQTTSSGSGPFTDVRAAVYQPQPHPQPPPYGHCVTDSGVVYSVGMQWLKTQGNKQMLCTCLGNGVSCQETAVTQTYGGNSNGEPCVLPFTYNGRTFYSCTTEGRQDGHLWCSTTSNYEQDQKYSFCTDHTVLVQTQGGNSNGALCHFPFLYNNHNYTDCTSEGRRDNMKWCGTTQNYDADQKFGFCPMAAHEEICTTNEGVMYRIGDQWDKQHDMGHMMRCTCVGNGRGEWTCIAYSQLRDQCIVDDITYNVNDTFHKRHEEGHMLNCTCFGQGRGRWKCDPVDQCQDSETGTFYQIGDSWEKYVHGVRYQCYCYGRGIGEWHCQPLQTYPSSSGPVEVFITETPSQPNSHPIQWNAPQPSHISKYILRWRPKNSVGRWKEATIPGHLNSYTIKGLKPGVVYEGQLISIQQYGHQEVTRFDFTTTSTSTPVTSNTVTGETTPFSPLVATSESVTEITASSFVVSWVSASDTVSGFRVEYELSEEGDEPQYLDLPSTATSVNIPDLLPGRKYIVNVYQISEDGEQSLILSTSQTTAPDAPPDPTVDQVDDTSIVVRWSRPQAPITGYRIVYSPSVEGSSTELNLPETANSVTLSDLQPGVQYNITIYAVEENQESTPVVIQQETTGTPRSDTVPSPRDLQFVEVTDVKVTIMWTPPESAVTGYRVDVIPVNLPGEHGQRLPISRNTFAEVTGLSPGVTYYFKVFAVSHGRESKPLTAQQTTKLDAPTNLQFVNETDSTVLVRWTPPRAQITGYRLTVGLTRRGQPRQYNVGPSVSKYPLRNLQPASEYTVSLVAIKGNQESPKATGVFTTLQPGSSIPPYNTEVTETTIVITWTPAPRIGFKLGVRPSQGGEAPREVTSDSGSIVVSGLTPGVEYVYTIQVLRDGQERDAPIVNKVVTPLSPPTNLHLEANPDTGVLTVSWERSTTPDITGYRITTTPTNGQQGNSLEEVVHADQSSCTFDNLSPGLEYNVSVYTVKDDKESVPISDTIIPAVPPPTDLRFTNIGPDTMRVTWAPPPSIDLTNFLVRYSPVKNEEDVAELSISPSDNAVVLTNLLPGTEYVVSVSSVYEQHESTPLRGRQKTGLDSPTGIDFSDITANSFTVHWIAPRATITGYRIRHHPEHFSGRPREDRVPHSRNSITLTNLTPGTEYVVSIVALNGREESPLLIGQQSTVSDVPRDLEVVAATPTSLLISWDAPAVTVRYYRITYGETGGNSPVQEFTVPGSKSTATISGLKPGVDYTITVYAVTGRGDSPASSKPISINYRTEIDKPSQMQVTDVQDNSISVKWLPSSSPVTGYRVTTTPKNGPGPTKTKTAGPDQTEMTIEGLQPTVEYVVSVYAQNPSGESQPLVQTAVTNIDRPKGLAFTDVDVDSIKIAWESPQGQVSRYRVTYSSPEDGIHELFPAPDGEEDTAELQGLRPGSEYTVSVVALHDDMESQPLIGTQSTAIPAPTDLKFTQVTPTSLSAQWTPPNVQLTGYRVRVTPKEKTGPMKEINLAPDSSSVVVSGLMVATKYEVSVYALKDTLTSRPAQGVVTTLENVSPPRRARVTDATETTITISWRTKTETITGFQVDAVPANGQTPIQRTIKPDVRSYTITGLQPGTDYKIYLYTLNDNARSSPVVIDASTAIDAPSNLRFLATTPNSLLVSWQPPRARITGYIIKYEKPGSPPREVVPRPRPGVTEATITGLEPGTEYTIYVIALKNNQKSEPLIGRKKTDELPQLVTLPHPNLHGPEILDVPSTVQKTPFVTHPGYDTGNGIQLPGTSGQQPSVGQQMIFEEHGFRRTTPPTTATPIRHRPRPYPPNVGEEIQIGHIPREDVDYHLYPHGPGLNPNASTGQEALSQTTISWAPFQDTSEYIISCHPVGTDEEPLQFRVPGTSTSATLTGLTRGATYNIIVEALKDQQRHKVREEVVTVGNSVNEGLNQPTDDSCFDPYTVSHYAVGDEWERMSESGFKLLCQCLGFGSGHFRCDSSRWCHDNGVNYKIGEKWDRQGENGQMMSCTCLGNGKGEFKCDPHEATCYDDGKTYHVGEQWQKEYLGAICSCTCFGGQRGWRCDNCRRPGGEPSPEGTTGQSYNQYSQRYHQRTNTNVNCPIECFMPLDVQADREDSRE

SEQ ID NO: 207 - protein, 523 aa, Homo sapiens
RPACRARAAAAQPLGPAALAEAAMGTARWLALGSLFALAGLLEGRLVGEEEAGFGECDKFFYAGTPPAGLAADSHVKICQRAEGAERFATLYSTRDRIPVYSAFRAPRPAPGGAEQRWLVEPQIDDPNSNLEEAINEAEAITSVNSLGSKQALNTDYLDSDYQRGQLYPFSLSSDVQVATFTLTNSAPMTQSFQERWYVNLHSLMDRALTPQCGSGEDLYILTGTVPSDYRVKDKVAVPEFVWLAACCAVPGGGWAMGFVKHTRDSDIIEDVMVKDLQKLLPFNPQLFQNNCGETEQDTEKMKKILEVVNQIQDEERMVQSQKSSSPLSSTRSKRSTLLPPEASEGSSSFLGKLMGFIATPFIKLFQLIYYLVVAILKNIVYFLWCVTKQVINGIESCLYRLGSATISYFMAIGEELVSIPWKVLKVVAKVIRALLRILCCLLKAICRVLSIPVRVLVDVATFPVYTMGAIPIVCKDIALGLGGTVSLLFDTAFGTLGGLFQVVFSVCKRIGYKVTFDNSGEL

SEQ ID NO: 208 - protein, 204 aa, Homo sapiens
MAAAGWRDGSGQEKYRLVVVGGGGVGKSALTIQFIQSYFVTDYDPTIEDSYTKQCVIDDRAARLDILDTAGQEEFGAMREQYMRTGEGFLLVFSVTDRGSFEEIYKFQRQILRVKDRDEFPMILIGNKADLDHQRQVTQEEGQQLARQLKVTYMEASAKIRMNVDQAFHELVRVIRKFQEQECPPSPEPTRKEKDKKGCHCVIF

SEQ ID NO: 209 - protein, 204 aa, Homo sapiens; identical to SEQ ID NO: 208

SEQ ID NO: 210 - protein, 393 aa, Homo sapiens
MAYDDSVKKEDCFDGDHTFEDIGLAAGRSQREKKRSYKDFLREEEEIAAQVRNSSKKKLKDSELYFLGTDTHKKKRKHSSDDYYYGDISSLESSQKKKKKSSPQSTDTAMDLLKAITSPLAAGSKPSKKTGEKSSGSSSHSESKKEHHRKKVSGSSGELPLEDGGSHKSKKMKPLYVNTETLTLREPDGLKMKLILSPKEKGSSSVDEESFQYPSQQATVKKSSKKSARDEQGALLLGHELQSFLKTARKKHKSSSDAHSSPGPEGCGSDASQFAESHSANLDLSGLEPILVESDSSSGGELEAGELVIDDSYREIKKKKKSKKSKKKKDKEKHKEKRHSKSKRSLGLSAVPVGEVTVTSGPPPSIPYAGAAAPPLPLPGLHTDGHSEKKKKK

SEQ ID NO: 211 - protein, 441 aa, Homo sapiens
AKGVWVLPSPPPRPGRGALVSGSGLRRGRSGTSWRPRRMNHKSKKRIREAKRSARPELKDSLDWTRHNYYESFSLSPAAVADNVERADALQLSVEEFVERYERPYKPVVLLNAQEGWSAQEKWTLERLKRKYRNQKFKCGEDNDGYSVKMKMKYYIEYMESTRDDSPLYIFDSSYGEHPKRRKLLEDYKVPKFFTDDLFQYAGEKRRPPYRWFVMGPPRSGTGIHIDPLGTSAWNALVQGHKRWCLFPTSTPRELIKVTRDEGGNQQDEAITWFNVIYPRTQLPTWPPEFKPLEILQKPGETVFVPGGWWHVVLNLDTTIAITQNFASSTNFPVVWHKTVRGRPKLSRKWYRILKQEHPELAVLADSVDLQESTGIASDSSSDSSSSSSSSSSDSDSECESGSEGDGTVHRRKKRRTCSMVGNGDTTSQDDCVSKERSSSR

SEQ ID NO: 212 - protein, 244 aa, Homo sapiens
MKERRASQKLSSKSIMDPNQNVKCKIVVVGDSQCGKTALLHVFAKDCFPENYVPTVFENYTASFEIDTQRIELSLWDTSGSPYYDNVRPLSYPDSDAVLICFDISRPETLDSVLKKWKGEIQEFCPNTKMLLVGCKSDLRTDVSTLVELSNHRQTPVSYDQGANMAKQIGAATYIECSALQSENSVRDIFHVATLACVNKTNKNVKRNKSQRATKRISHMPSRPELSAVATDLRKDKAKSCTVM

SEQ ID NO: 213 - protein, 1565 aa, Homo sapiens [sequence omitted]

SEQ ID NO: 214 - protein, 251 aa, Homo sapiens
MELSAIGEQVFAVESIRKKRVRKGKVEYLVKWKGWPPKYSTWEPEEHILDPRLVMAYEEKEERDRASGYRKRGPKPKRLLLQRLYSMDLRSSHKAKGKEKLCFSLTCPLGSGSPEGVVKAGAPELVDKGPLVPTLPFPLRKPRKAHKYLRLSRKKFPPRGPNLESHSHRRELFLQEPPAPDVLQAAGEWEPAAQPPEEEADADLAEGPPPWTPALPSSEVTVTDITANSITVTFREAQAAEGFFRDRSGKF

SEQ ID NO: 215 - protein, 218 aa, Homo sapiens
ARGLCVLGSEVLEALAGAAPHSLFFKDALRDQGRIVCAERTVLLLQKPLLSVVSGASSCELPGPVMLDSLDSATPVNSICSVQGTVVGVDESTAFSWPVCDMCGNGRLEQRPEDRGAFSCGDCSRVVTSPVLKRHLQVFLDCRSRPQCRVKVKLLQRSISSLLRFAAGEDGSYEVKSVLGKEVGLLNCFVQSVTAHPTSCIGLEEIELLSAGGASAEH

SEQ ID NO: 216 - protein, 420 aa, Homo sapiens
MMYSPICLTQDEFHPFMEALLPHVRAIAYTWFNLQARKRKYFKKHEKRMSKDEERAVKDELLSEKPEIKQKWASRLLAKLRKDIRQEYREDFVLTVTGKKHPCCVLSNPDQKGKIRRIDCLRQADKVWRLDLVMVILFKGIPLESTDGERLMKSPHCTNPALCVQPHHITVSVKELDLFLAYYVQEQDSGQSGSPSHNDPAKNPPGYLEDSFVKSGVFNVSELVRVSRTPITQGTGVNFPIGEIPSQPYYHDMNSGVNLQRSLSSPPSSKRPKTISIDENMEPSPTGDFYPSPSSPAAGSRTWHERDQDMSSPTTMKKPEKPLFSSASPQDSSPRLSTFPQHHHPGIPGVAHSVISTRTPPPPSPLPFPTQAILPPAPSSYFSHPTIRYPPHLNPQDTLKNYVPSYDPSSPQTSQSWYLG

SEQ ID NO: 217 - protein, 130 aa, Homo sapiens
MRSSKSKEVPLPNPRNSQSKDTVQDITTSWDALSQTKAALRHIENKLEVAPTSTAVCDSVMDTKKSSTSATRKISRKDGRYLDDSWVNAPISKSTKSRKEKSRSPLRATTLESNVKKNNRVEFREPLVSY

SEQ ID NO: 218 - protein, 212 aa, Homo sapiens
MDPLFQQTHKQVHEIQSCMGRLETADKQSVHIVENEIQASIDQIFSRLERLEILSSKEPPNKRQNARLRVDQLKYDVQHLQTALRNFQHRRHAREQQERQREELLSRTFTTNDSDTTIPMDESLQFNSSLQKVHNGMDDLILDGHNILDGLRTQRLTLKGTQKKILDIANMLGLSNTVMRLIEKRAFQDKYFMIGGMLLTCVVMFLVVQYLT

SEQ ID NO: 219 - protein, 479 aa, Homo sapiens
MGAFLDKPKTEKHNAHGAGNGLRYGLSSMQGWRVEMEDAHTAVVGIPHGLEDWSFFAVYDGHAGSRVANYCSTHLLEHITTNEDFRAAGKSGSALELSVENVKNGIRTGFLKIDEYMRNFSDLRNGMDRSGSTAVGVMISPKHIYFINCGDSRAVLYRNGQVCFSTQDHKPCNPREKERIQNAGGSVMIQRVNGSLAVSRALGDYDYKCVDGKGPTEQLVSPEPEVYEILRAEEDEFIILACDGIWDVMSNEELCEYVKSRLEVSDDLENVCNWVVDTCLHKGSRDNMSIVLVCFSNAPKVSDEAVKKDSELDKHLESRVEEIMEKSGEEGMPDLAHVMRILSAENIPNLPPGGGLAGKRNVIEAVYSRLNPHRESDGASDEAEESGSQGKLVEALRQMRINHRGNYRQLLEEMLTSYRLAKVEGEESPAEPAATATSSNSDAGNPVTMQESHTESESGLAELDSSNEDAGTKMSGEKI

SEQ ID NO: 220 - protein, 525 aa, Homo sapiens
EKDEMTKDCMLANGKLDEDYEEEDEEEESLMWRAPKEEADYEDDFLEYDQEHIRFIDNMLMGSGAFVKKISLSPFSTTDSAYEWKMPKKSSLGSMPFSSDFEDFDYSSWDAMCYLDPSKAVEEDDFVVGFWNPSEENCGVDTGKQSISYDLHTEQCIADKSIADCVEALLGCYLTSCGERAAQLFLCSLGLKVLPVIKRTDREKALCPTRENFNSQQKNLSVSCAAASVASSRSSVLKDSEYGCLKIPPRCMFDHPDADKTLNHLISGFENFEKKINYRFKNKAYLLQAFTHASYHYNTITDCYQRLEFLGDAILDYLITKHLYEDPRQHSPGVLTDLRSALVNNTIFASLAVKYDYHKYFKAVSPELFHVIDDFVQFQLEKNEMQGMDSELRRSEEDEEKEEDIEVPKAMGDIFESLAGAIYMDSGMSLETVWQVYYPMMRPLIEKFSANVPRSPVRELLEMEPETAKFSPAERTYDGKVRVTVEVVGKGKFKGVGRSYRIAKSAAAKRALRSLKANQPQVPNS

SEQ ID NO: 221 - protein, 1098 aa, Homo sapiens
MLEGDLVSKMLRAVLQSHKNGVALPRLQGEYRSLTGDWIPFKQLGFPTLEAYLRSVPAVVRIETSRSGEITCYAMACTETARIAQLVARQRSSKRKTGRQVNCQMRVKKTMPFFLEGKPKATLRQPGFASNFSVGKKPNPAPLRDKGNSVGVKPDAEMSPYMLHTTLGNEAFKDIPVQRHVTMSTNNRFSPKASLQPPLQMHLSRTSTKEMSDNLNQTVEKPNVKPPASYTYKMDEVQNRIKEILNKHNNGIWISKLPHFYKELYKEDLNQGILQQFEHWPHICTVEKPCSGGQDLLLYPAKRKQLLRSELDTEKVPLSPLPGPKQTPPLKGCPTVMAGDFKEKVADLLVKYTSGLWASALPKAFEEMYKVKFPEDALKNLASLSDVCSIDYISGNPQKAILYAKLPLPTDKIQKDAGQAHGDNDIKAMVEQEYLQVEESIAESANTFMEDITVPLLMIPTEASPSVLVVELSNTNEVVIRYVGKDYSAAQELMEDEMKEYYSKNPKITPVQAVNVGQLLAVNAEEDAWLRAQVISTEENKIKVCYVDYGFSENVEKSKAYKLNPKFCSLSFQATKCKLAGLEVLSDDPDLVKVVESLTCGKIFAVEILDKADIPLVVLYDTSGEDDININATCLKAICDKSLEVHLQVDAMYTNVKVTNICSDGTLYCQVPCKGLNKLSDLLRKIEDYFHCKHMTSECFVSLPFCGKICLFHCKGKWLRVEITNVHSSRALDVQFLDSGTVTSVKVSELREIPPRFLQEMIAIPPQAIKCCLADLPQSIGMWTPDAVLWLRDSVLNCSDCSIKVTKVDETRGIAHVYLFTPKNFPDPHRSINRQITNADLWKHQKDVFLSAISSGADSPNSKNGNMPMSGNTGENFRKNLTDVIKKSMVDHTSAFSTEELPPPVHLSKPGEHMDVYVPVACHPGYFVIQPWQEIHKLEVLMEEMILYYSVSEERHIAVEKDQVYAAKVENKWHRVLLKGILTNGLVSVYELDYGKHELVNIRKVQPLVDMFRKLPFQAVTAQLAGVKCNQWSEEASMVFRNHVEKKPLVALVQTVIENANPWDRKVVVYLVDTSLPDTDTWIHDFMSEYLIELSKVN

SEQ ID NO: 222 - protein, 147 aa, Homo sapiens
MALQRTHSLLLLLLLTLLGLGLVQPSYGQDGMYQRFLRQHVHPEETGGSDRYCNLMMQRRKMTLYHCKRFNTFIHEDIWNIRSICSTTNIQCKNGKMNCHEGVVKVTDCRDTGSSRAPNCRYRAIASTRRVVIACEGNPQVPVHFDG

SEQ ID NO: 223 - protein, 275 aa, Homo sapiens
MSSFGYRTLTVALFTLICCPGSDEKVFEVHVRPKKLAVEPKGSLEVNCSTTCNQPEVGGLETSLNKILLDEQAQWKHYLVSNISHDTVLQCHFTCSGKQESMNSNVSVYQPPRQVILTLQPTLVAVGKSFTIECRVPTVEPLDSLTLFLFRGNETLHYETFGKAAPAPQEATATFNSTADREDGHRNFSCLAVLDLMSRGGNIFHKHSAPKMLEIYEPVSDSQMVIIVTVVSVLLSLFVTSVLLCFIFGQHLRQQRMGTYGVRAAWRRLPQAFRP

SEQ ID NO: 224 - protein, 1077 aa, Homo sapiens
PRFRCLFCLQFAIPASRMEQLNELELLMEKSFWEEAELPAELFQKKVVASFPRTVLSTGMDNRYLVLAVNTVQNKEGNCEKRLVITASQSLENKELCILRNDWCSVPVEPGDIIHLEGDCTSDTWIIDKDFGYLILYPDMLISGTSIASSIRCMRRAVLSETFRSSDPATRQMLIGTVLHEVFQKAINNSFAPEKLQELAFQTIQEIRHLKEMYRLNLSQDEIKQEVEDYLPSFCKWAGDFMHKNTSTDFPQMQLSLPSDNSKDNSTCNIEVVKPMDIEESIWSPRFGLKGKIDVTVGVKIHRGYKTKYKIMPLELKTGKESNSIEHRSQVVLYTLLSQERRADPEAGLLLYLKTGQMYPVPANHLDKRELLKLRNQMAFSLFHRISKSATRQKTQLASLPQIIEEEKTCKYCSQIGNCALYSRAVEQQMDCSSVPIVMLPKIEEETQHLKQTHLEYFSLWCLMLTLESQSKDNKKNHQNIWLMPASEMEKSGSCIGNLIRMEHVKIVCDGQYLHNFQCKHGAIPVTNLMAGDRVIVSGEERSLFALSRGYVKEINMTTVTCLLDRNLSVLPESTLFRLDQEEKNCDIDTPLGNLSKLMENTFVSKKLRDLIIDFREPQFISYLSSVLPHDAKDTVACILKGLNKPQRQAMKKVLLSKDYTLIVGMPGTGKTTTICTLVRILYACGFSVLLTSYTHSAVDNILLKLAKFKIGFLRLGQIQKVHPAIQQFTEQEICRSKSIKSLALLEELYNSQLIVATTCMGINHPIFSRKIFDFCIVDEASQISQPICLGPLFFSRRFVLVGDHQQLPPLVLNREARALGMSESLFKRLEQNKSAVVQLTVQYRMNSKIMSLSNKLTYEGKLECGSDKVANAVINLRHFKDVKLELEFYADYSDNPWLMGVFEPNNPVCFLNTDKVPAPEQVEKGGVSNVTEAKLIVFLTSIFVKAGCSPSDIGIIAPYRQQLKIINDLLARSIGMVEVNTVDKYQGRDKSIVLVSFVRSNKDGTVGELLKDWRRLNVAITRAKHKLILLGCVPSLNCYPPLEKLLNHLNSEKLIIDLPSREHESLCHILGDFQRE

SEQ ID NO: 225 - protein, 252 aa, Homo sapiens
FSSSRGGSGVASLERAESWSTEPAKAIKPIDRKSVHQICSGPVVLSLSTAVKKIVENSLDAGATNIDLKLKDYGVDLIEVSGNGCGVEEENFEGLTLKHHTSKIQEFADLPQVETFGFRGEALSSLCALSDVTISTCHVSAKVGTRLVFDHDGKIIQKTPYPHPRGTTVSVKQLFSTLPVHHKEFQRNIKKKRACFPFAFCRDCQFLEGSPAMLPVQPAKLTPRSTPPHPCSLEDNVITVFSSVKNGPGSSR

SEQ ID NO: 226 - protein, 563 aa, Homo sapiens [sequence omitted]

SEQ ID NO: 227 - protein, 236 aa, Homo sapiens
MCVTYHNGTGYCKCPEGFLGEYCQHRDPCEKNRCQNGGTCVAQAMLGKATCRCASGFTGEDCQYSTSHPCFVSRPCLNGGTCHMLSRDTYECTCQVGFTGKECQWTDACLSHPCANGSTCTTVANQFSCKCLTGFTGQKCETDVNECDIPGHCQHGGTCLNLPGSYQCQCLQGFTGQYCDSLYVPCAPSPCVNGGTCRQTGDFTFECNCLPETVRRGTELWERDREVWNGKEHDEN

SEQ ID NO: 228 - protein, 356 aa, Homo sapiens
MPILKQLVSSSVHSKRRSRADLTAEMISAPLGDFRHTMHVGRAGDAFGDTSFLNSKAGEPDGESLDEQPSSSSSKRSLLSRKFRGSKRSQSVTRGEREQRDMLGSLRDSALFVKNAMSLPQLNEKEAAEKGTSKLPKSLSSSPVKKANDGEGGDEEAGTEEAVPRRNGAAGPHSPDPLLDEQAFGDLTDLPVVPKATYGLKHAESIMSFHIDLGPSMLGDVLSIMDKEEWDPEEGEGGYHGDEGAAGTITQAPPYAVAAPPLARQEGKAGPDLPSLPSHALEDEGWAAAAPSPGSARSMGSHTTRDSSSLSSCTSGILEERSPAFRGPDRARAAVSRQPDKEFSFMDEEEEDEIRV

SEQ ID NO: 229 - protein, 171 aa, Homo sapiens
MEEYAREPCPWRIVDDCGGAFTMGTIGGGIFQAIKGFRNSPVGVNHRLRGSLTAIKTRAPQLGGSFAVWGGLFSMIDCSMVQVRGKEDPWNSITSGALTGAILAARNGPVAMVGSAAMGGILLALIEGAGILLTRFASAQFPNGPQFAEDPSQLPSTQLPSSPFGDYRQYQ

SEQ ID NO: 230 - protein, 1410 aa, Homo sapiens
MADTDLFMECEEEELEPWQKISDVIEDSVVEDYNSVDKTTTVSVSQQPVSAPVPIAAHASVAGHLSTSTTVSSSGAQNSDSTKKTLVTLIANNNAGNPLVQQGGQPLILTQNPAPGLGTMVTQPVLRPVQVMQNANHVTSSPVASQPIFITTQGFPVRNVRPVQNAMNQVGIVLNVQQGQTVRPITLVPAPGTQFVKPTVGVPQVFSQMTPVRPGSTMPVRPTTNTFTTVIPATLTIRSTVPQSQSQQTKSTPSTSTTPTATQPTSLGQLAVQSPGQSNQTTNPKLAPSFPSPPAVSIASFVTVKRPGVTGENSNEVAKLVNTLNTIPSLGQSPGPVVVSNNSSAHGSQRTSGPESSMKVTSSIPVFDLQDGGRKICPRCNAQFRVTEALRGHMCYCCPEMVEYQKKGKSLDSEPSVPSAAKPPSPEKTAPVASTPSSTPIPALSPPTKVPEPNENVGDAVQTKLIMLVDDFYYGRDGGKVAQLTNFPKVATSFRCPHCTKRLKNNIRFMNHMKHHVELDQQNGEVDGHTICQHCYRQFSTPFQLQCHLENVHSPYESTTKCKICEWAFESEPLFLQHMKDTHKPGEMPYVCQVCQYRSSLYSEVDVHFRMIHEDTRHLLCPYCLKVFKNGNAFQQHYMRHQKRNVYHCNKCRLQFLFAKDKIEHKLQHHKTFRKPKQLEGLKPGTKVTIRASRGQPRTVPVSSNDTPPSALQEAAPLTSSMDPLPVFLYPPVQRSIQKRAVRKMSVMGRQTCLECSFEIPDFPNHFPTYVHCSLCRYSTCCSRAYANHMINNHVPRKSPKYLALFKNSVSGIKLACTSCTFVTSVGDAMAKHLVFNPSHRSSSILPRGLTWIAHSRHGQTRDRVHDRNVKNMYPPPSFPTNKAATVKSAGATPAEPEELLTPLAPALPSPASTATPPPTPTHPQALALPPLVTEGAECLNVDDQDEGSPVTQEPELASGGGGSGGVGKKEQLSVKKLRVVLFALCCNTEQAAEHFRNPQRRIRRWLRRFQASQGENLEGKYLSFGAEEKLAEWVLTQREQQLPVNEETLFQKATKIGRSLEGGFKISYEWAVRFMLRHHLTPHARRAVAHTLPKDVAENAGLFIDFVQRQIHNQDLPLSMIVAIDEISLFLDTEVLSSDDRKENALQTVGTGEPWCDVVLAILADGTVLPTLVFYRGQMDQPANMPDSILLEAKESGYSDDEIMELWSTRVWQKHTACQRSKGMLVMDCHRTHLSEEVLAMLSASSTLPAVVPAGCSSKIQPLDVCIKRTVKNFLHKKWKEQAREMADTACDSDVLLQLVLVRLGEVLGVIGDCPELVQRSFLVASVLPGPDGNINSPTRNADMQEELIASLEEQLKLSGEHSESSTPRPRSSPEETIEPESLHQLFEGESETESFYGFEEADLDLMEI

SEQ ID NO: 231 - protein, 499 aa, Homo sapiens
MELSEPIVENGETEMSPEESWEHKEEISEAEPGGGSLGDGRPPEESAHEMMEEEEEIPKPKSVVAPPGAPKKEHVNVVFIGHVDAGKSTIGGQIMYLTGMVDKRTLEKYEREAKEKNRETWYLSWALDTNQEERDKGKTVEVGRAYFETEKKHFTILDAPGHKSFVPNMIGGASQADLAVLVISARKGEFETGFEKGGQTREHAMLAKTAGVKHLIVLINKMDDPTVNWSNERYEECKEKLVPFLKKVGFNPKKDIHFMPCSGLTGANLKEQSDFCPWYIGLPFIPYLDNLPNFNRSVDGPIRLPIVDKYKDMGTVVLGKLESGSICKGQQLVMMPNKHNVEVLGILSDDVETDTVAPGENLKIRLKGIEEEEILPGFILCDPNNLCHSGRTFDAQIVIIEHKSIICPGYNAVLHIHTCIEEVEITALICLVDKKSGEKSKTRPRFVKQDQVCIARLRTAGTICLETFKDFPQMGRFTLRDEGKTIAIGKVLKLVPEKD

SEQ ID NO: 232 - protein, 1433 aa, Homo sapiens
GENTSLSGIPTSSVLSLSLPSSVAQSNFPQGSGASEMVSNQPANLLVQPPSQPVPENLVPESQKDRKAGSALPGFANSPAGSTSVVLVPPAHGTLVPDGNKANHSSHQEDTYGALDFALSRTLENPVNVYNPSHSDSLASQQSVASHPRQSGPGAPNLDRFYQQVTKDAQGQPGLERAQQELAPPQQQASPPQLPKAMFSELSNPESLPAQGQAQNSAQSPASLVLVDAGQQLPPRPPQSSSVSLVSSGSGQAAVPSEQPWPQPVPALAPGPPPQDLAAYYYYRPLYDAYQPQYSLPYPPEPGAASLYYQDVYSLYEPRYRPYDGAASAYAQNYRYPEPERPSSRASHSSERPPPRQGYPEGYYSSKSGWSSQSDYYASYYSSQYDYGDPGHWDRYHYSARVRDPRTYDRRYWCDAEYDAYRREHSAFGDRPEKRDNNWRYDPRFTGSFDDDPDPHRDPYGEEVDRRSVHSEHSARSLHSAHSLASRRSSLSSHSHQSQIYRSHNVAAGSYEAPLPPGSFHGDFAYGTYRSNFSSGPGFPEYGYPADTVWPAMEQVSSRPTSPEKFSVPHVCARFGPGGQLIKVIPNLPSEGQPALVEVHSMEALLQHTSEQEEMRAFPGPLAKDDTHKVDVINFAQNKAMKCLQNENLIDKESASLLWNFIVLLCRQNGTVVGTDIAELLLRDHRTVWLPGKSPNEANLIDFTNEAVEQVEEEESGEAQLSFLTGGPAAAASSLERETERFRELLLYGRKKDALESAMKNGLWGHALLLASKMDSRTHARVMTRFANSLPINDPLQTVYQLMSGRMPAASTCCGDEKWGDWRPHLAMVLSNLNNNMDVESRTMATMGDTLASRGLLDAAHFCYLMAQAGFGVYTKKTTKLVLIGSNHSLPFLKFATNEAIQRTEAYEYAQSLGAETCPLPSFQVFKFIYSCRLAEMGLATQAFHYCEAIAKSILTQPHLYSPVLISQLVQMASQLRLFDPQLKEKPEEESLAAPTWLVHLQQVERQIKEGAGVWHQDGALPQQCPGTPSSEMEQLDRPGLSQPGALGIANPLLAVPAPSPEHSSPSVRLLPSAPQTLPDGPLASPARVPMFPVPLPPGPLEPGPGCVTPGPALGFLEPSGPGLPPGVPPLQERRHLLQEARSPDPGIVPQEAPVGNSLSELSEENFDGKFANLTPSRTVPDSEAPPGWDRADSGPTQPPLSLSPAPETKRPGQAAKKETKEPKKGESWFFRWLPGKKKTEAYLPDDKNKSIVWDEKKNQWVNLNEPEEEKKAPPPPPTSMPKTVQAAPPALPGPPGAPVNMYSRRAAGTRARYVDVLNPSGTQRSEPALAPADFVAPLAPLPIPSNLFVPTPDAEEPQLPDGTGREGPAAARGLANPEPAPEPKAPGDLPAAGGPPSGAMPFYNPAQLAQACATSGSSRLGRIGQRKHLVLN

SEQ ID NO: 233 - protein, 864 aa, Homo sapiens; identical to SEQ ID NO: 181

SEQ ID NO: 234 - protein, 84 aa, Homo sapiens
MRLRFNNDRMKTTIKETTILSSAILTFLTYLMKMSFERCTARNKMFVNSPFYPRVDNYCTSSWKKFYLKCYFSLNTIKKEKKMT

SEQ ID NO: 235 - protein, 313 aa, Homo sapiens
MPKVKSGAIGRRRGRQEQRRELKSAGGLMFNTGIGQHILKNPLIINSIIDKAALRPTDVVLEVGPGTGNMTVKLLEKAKKVVACELDPRLVAELHKRVQGTPVASKLQVLVGDVLKTDLPFFDTCVANLPYQISSPFVFKLLLHRPFFRCAILMFQREFALRLVAKPGDKLYCRLSINTQLLARVDHLMKVGKNNFRPPPKVESSVVRIEPKNPPPPINFQEWDGLVRITFVRKNKTLSAAFKSSAVQQLLEKNYRIHCSVHNIIIPEDFSIADKIQQILTSTGFSDKRARSMDIDDFIRLLHGFNAEGIHFS

SEQ ID NO: 236 - protein, 400 aa, Homo sapiens [sequence omitted]

SEQ ID NO: 237 - protein, 739 aa, Homo sapiens [sequence omitted]

SEQ ID NO: 238 - protein, 1117 aa, Homo sapiens
MARTRDRVRLLLLLICFNVGSGLHLQVLSTRNENKLLPKHPHLVRQKRAWITAPVALREGEDLSKKNPIAKIHSDLAEERGLKITYKYTGKGITEPPFGIFVFNKDTGELNVTSILDREETPFFLLTGYALDARGNNVEKPLELRIKVLDINDNEPVFTQDVFVGSVEELSAAHTLVMKINATDADEPNTLNSKISYRIVSLEPAYPPVFYLNKDTGEIYTTSVTLDREEHSSYTLTVEARDGNGEVTDKPVKQAQVQIRILDVNDNIPVVENKVLEGMVEENQVNVEVTRIKVFDADEIGSDNWLANFTFASGNEGGYFHIETDAQTNEGIVTLIKEVDYEEMKNLDFSVIVANKAAFHKSIRSKYKPTPIPIKVKVKNVKEGIHFKSSVISIYVSESMDRSSKGQIIGNFQAFDEDTGLPAHARYVKLEDRDNWISVDSVTSEIKLAKLPDFESRYVQNGTYTVKIVAISEDYPRKTITGTVLINVEDINDNCPTLIEPVQTICHDAEYVNVTAEDLDGHPNSGPFSFSVIDKPPGMAEKWKIARQESTSVLLQQSEKKLGRSEIQFLISDNQGFSCPEKQVLTLTVCEVLHGSGCREAQHDSYVGLGPAAIALMILAFLLLLLVPLLLLMCHCGKGAKAFTPIPGTIEMLHPWNNEGAPPEDKVVPSFLPVDQGGSLVGRNGVGGMAKEATMKGSSSASIVKGQHEMSEMDGRWEEHRSLLSGRATQFTGATGAIMTTETTKTARATGASRDMAGAQAAAVALNEEFLRNYFTDKAASYTEEDENHTAKDCLLVYSQEETESLNASIGCCSFIEGELDDRFLDDLGLKFKTLAEVCLGQKIDINKEIEQRQKPATETSMNTASHSLCEQTMVNSENTYSSGSSFPVPKSLQEANAEKVTQEIVTERSVSSRQAQKVATPLPDPMASRNVIATETSYVTGSTMPPTTVILGPSQPQSLIVTERVYAPASTLVDQPYANEGTVVVTERVIQPHGGGSNPLEGTQHLQDVPYVMVRERESFLAPSSGVQPTLAMPNIAVGQNVTVTERVLAPASTLQSSYQIPTENSMTARNTTVSGAGVPGPLPDFGLEESGHSNSTITTSSTRVTKHSTVQHSYS

SEQ ID NO: 239 - protein, 439 aa, Homo sapiens
MIIPSLEELDSLKYSDLQNLAKSLGLRANLRATKLLKALKGYIKHEARKGNENQDESQTSASSCDETEIQISNQEEAERQPLGHVTKTRRRCKTVRVDPDSQNHSEIKISNPTEFQNHEKQESQDLRATAKVPSPPDEHQEAENAVSSGNRDSKVPSEGKKSLYTDESSKPGKNKRTAITTPNFKKLHEAHFKEMESIDQYIERKKKHFEEHNSMNELKQPINKGGVRTPVPPRGRLSVASTPISQRRSQGRSCGPASQSTLGLKGSLKRSAISAAKTGVRFSAATKDNEHKRSLTKTPARKSAHVTVSGGTPKGEAVLGTHKLKTITGNSAAVITPFKLTTEATQTPVSNKKPVFDLKASLSRPLNYEPHKGKLKPWGQSKENNYLNQHVNRINFYKKTYKQPHLQTKEEQRKKREQERKEKKAKVLGMRRGLILAED

SEQ ID NO: 240 - protein, 217 aa, Homo sapiens
RPWTLDLVDEGHWPGPRVFGGRRGLAWVPTGCLTSSCSLHLGCVGQGLCCHSRNRFSSVGLPFLHPGLKWMPDANPSSGHVQPAGQPRGSLSSRAKDSRLPFSLLAFLLCPAVAAGEAAAAGGRRSCLSAPPCPTPAPALEIWSPLELSWTGGQLRACALNAALSRGREQDGEWKESPPGFVNCKKGLFQDDTRNRARALAQSLGACLFFIIVFKSL

SEQ ID NO: 241 - protein, 128 aa, Homo sapiens
SFPKYKPSSLRTLPETLDPAEYNISPETRRAQAERLAIRAQLKREYLLQYNDPNRRGLIENPALLRWAYARTINVYPNFRPTPKNSLMGALCGFGPLIFIYYIIKTERDRKEKLIQEGKLDRTFHLSY

SEQ ID NO: 242 - protein, 148 aa, Homo sapiens
MANLSRCNLAHANLCCANLERADLSGSVLDCANLQGVKMLCSNAEGASLKLCNFEDPSGLKANLEGANLKGVDMEGSQMTGINLRVATLKNAKLKNCNLRGATLAGTDLENCDLSGCDLQEANLRGSNVKGAIFEEMLTPLHMSQSVR

SEQ ID NO: 243 - protein, 314 aa, Homo sapiens
PRAPGRSLHPPAPGTVDSTTLSSALSAPKQPGTAQRPACRHGKSLSHLPLHSSKEDAYDGVTSENMRNGLVNSEVHNEDGRNGDVSQFPYVEFTGRDSVTCPTCQGTGRIPRGQENQLVALIPYSDQRLRPRRTKLYVMASVFVCLLLSGLAVFFLFPRSIDVKYIGVKSAYVSYDVQKRTIYLNITNTLNITNNNYYSVEVENITAQVQFSKTVIGKARLNNISIIGPLDMKQIDYTVPTVIAEEMSYMYDFCTLISIKVHNIVLMMQVTVTTTYFGHSEQISQERYQYVDCGRNTTYQLGQSEYLNVLQPQQ

SEQ ID NO: 244 - protein, 942 aa, Homo sapiens [sequence omitted]

SEQ ID NO: 245 - protein, 376 aa, Homo sapiens [sequence omitted]

SEQ ID NO: 246 - protein, 930 aa, Homo sapiens
MLLGWASLLLCAFRLPLAAVGPAATPAQDKAGQPPTAAAAAQPRRRQGEEVQERAEPPGHPHPLAQRRRSKGLVQNIDQLYSGGGKVGYLVYAGGRRFLLDLERDGSVGIAGFVPAGGGTSAPWRHRSHCFYRGTVDASPRSLAVFDLCGGLDGFFAVKHARYTLKPLLRGPWAEEEKGRVYGDGSARILHVYTREGFSFEALPPRASCETPASTPEAHEHAPAHSNPSGRAALASQLLDQSALSPAGGSGPQTWWRRRRRSISRARQVELLLVADASMARLYGRGLQHYLLTLASIANRLYSHASIENHIRLAVVKVVVLGDKDKSLEVSKNAATTLKNFCKWQHQHNQLGDDHEEHYDAAILFTREDLCGHHSCDTLGMADVGTICSPERSCAVIEDDGLHAAFTVAHEIGHLLGLSHDDSKFCEETFGSTEDKRLMSSILTSIDASKPWSKCTSATITEFLDDGHGNCLLDLPRKQILGPEELPGQTYDATQQCNLTFGPEYSVCPGMDVCARLWCAVVRQGQMVCLTKKLPAVEGTPCGKGRICLQGKCVDKTKKKYYSTSSHGNWGSWGSWGQCSRSCGGGVQFAYRHCNNPAPRNNGRYCTGKRAIYRSCSLMPCPPNGKSFRHEQCEAKNGYQSDAKGVKTFVEWVPKYAGVLPADVCKLTCRAKGTGYYVVFSPKVTDGTECRPYSNSVCVRGKCVRTGCDGIIGSKLQYDKCGVCGGDNSSCTKIVGTFNKKSKGYTDVVRIPEGATHIKVRQFKAKDQTRFTAYLALKKKNGEYLINGKYMISTSETIIDINGTVMNYSGWSHRDDFLHGMGYSATKEILIVQILATDPTKPLDVRYSFFVPKKSTPKVNSVTSHGSNKVGSHTSQPQWVTGPWLACSRTCDTGWHTRTVQCQDGNRKLAKGCPLSQRPSAFKQCLLKKC

SEQ ID NO: 247 - protein, 608 aa, Homo sapiens
MVGCAFVLFLFLLHRDVSSREEATEKPWLKSLVSRKDHVLDLMLEAMNNLRDSMPKLQIRAPEAQQTLFSINQSCLPGFYTPAELKPFWERPPQDPNAPGADGKAFQKSKWTPLETQEKEEGYKKHCFNAFASDRISLQRSLGPDTRPPECVDQKFRRCPPLATTSVIIVFHNEAWSTLLRTVYSVLHTTPAILLKEIILVDDASTEEHLKEKLEQYVKQLQVVRVVRQEERKGLITARLLGASVAQAEVLTFLDAHCECFHGWLEPLLARIAEDKTVVVSPDIVTIDLNTFEFAKPVQRGRVHSRGNFDWSLTFGWETLPPHEKQRRKDETYPIKSPTFAGGLFSISKSYFEHIGTYDNQMEIWGGENVEMSFRVWQCGGQLEIIPCSVVGHVFRTKSPHTFPKGTSVIARNQVRLAEVWMDSYKKIFYRRNLQAAKMAQEKSFGDISERLQLREQLHCHNFSWYLHNVYPEMFVPDLTPTFYGAIKNLGTNQCLDVGENNRGGKPLIMYSCHGLGGNQYFEYTTQRDLRHNIAKQLCLHVSKGALGLGSCHFTGKNSQVPKDEEWELAQDQLIRNSGSGTCLTSQDKKPAMAPCNPSDPHQLWLFV

SEQ ID NO: 248 - protein, 1496 aa, Homo sapiens
MMANWAEARPLLILIVLLGQFVSIKAQEEDEDEGYGEEIACTQNGQMYLNRDIWKPAPCQICVCDNGAILCDKIECQDVLDCADPVTPPGECCPVCSQTPGGGNTNFGRGRKGQKGEPGLVPVVTGIRGRPGPAGPPGSQGPRGERGPKGRPGPRGPQGIDGEPGVPGQPGAPGPPGHPSHPGPDGLSRPFSAQMAGLDEKSGLGSQVGLMPGSVGPVGPRGPQGLQGQQGGAGPTGPPGEPGDPGPMGPIGSRGPEGPPGKPGEDGEPGRNGNPGEVGFAGSPGARGFPGAPGLPGLKGHRGHKGLEGPKGEVGAPGSKGEAGPTGPMGAMGPLGPRGMPGERGRLGPQGAPGQRGAHGMPGKPGPMGPLGIPGSSGFPGNPGMKGEAGPTGARGPEGPQGQRGETGPPGPVGSPGLPGAIGTDGTPGPKGPTGSPGTSGPPGSAGPPGSPGPQGSTGPQGNSGLPGDPGFKGEAGPKGEPGPHGIQGPIGPPGEEGKRGPRGDPGTLGPPGPVGERGAPGNRGFPGSDGLPGPKGAQGERGPVGSSGPKGSQGDPGRPGEPGLPGARGLTGNPGVQGPEGKLGPLGAPGEDGRPGPPGSIGIKGQPGTMGLPGPKGSNGDPGKPGEAGNPGVPGQRGAPGKDGKVGPYGPPGPPGLRGERGEQGPPGPTGFQGHPGPPGPPGEGGKPGDQGVPGGPGAVGPLGPRGERGNPGERGEPGITGLPGEKGMAGGHGPDGPKGSPGPSGTPGDTGPPGLQGMPGERGIAGTPGPKGDRGGIGEKGAEGTAGNDGAGGLPGPLGPPGPAGLLGEKGEPGPRGLVGPPGSRGNPGSRGENGPTGAVGFAGPQGSDGQPGVKGEPGEPGQKGDAGSPGPQGLAGSPGPHGPNGVPGLKGGRGTQGPPGATGFPGSAGRVGPPGPAGAPGPAGPLGEPGKEGPPGPRGDPGSHGRVGVRGPAGPPGGPGDKGDPGEDGQPGPDGPPGPAGTTGQRGIVGMPGQRGERGMPGLPGPAGTPGKVGPTGATGDKGPPGPVGPPGSNGPVGEPGPEGPAGNDGTPGRDGAVGERGDRGDPGPAGLPGSQGAPGTPGPVGAPGDAGQRGDPGSRGPIGHLGRAGKRGLPGPQGPRGDKGDHGDRGDRGQKGHRGFTGLQGLPGPPGPNGEQGSAGIPGPFGPRGPPGPVGPSGKEGNPGPLGPLGPPGVRGSVGEAGPEGPPGEPGPPGPPGPPGHLTAALGDIMGHYDESMPDPLPEFTEDQAAPDDKNKTDPGVHATLKSLSSQIETMRSPDGSKKHPARTCDDLKLCHSAKQSGEYWIDPNQGSVEDAIKVYCNMETGETCISANPSSVPRKTWWASKSPDNKPVWYGLDMNRGSQFAYGDHQSPNTAITQMTFLRLLSKEASQNITYICKNSVGYMDDQAKNLKKAVVLKGANDLDIKAEGNIRFRYIVLQDTCSKRNGNVGKTVFEYRTQNVARLPIIDLAPVDVGGTDQEFGVEIGPVCFV

SEQ ID NO: 249 - protein, 495 aa, Homo sapiens
MEALLEGIQNRGHGGGFLTSCEAELQELMKQIDIMVAHKKSEWEGRTHALETCLKIREQELKSLRSQLDVTHKEVGMLHQQVEEHEKIKQEMTMEYKQELKKLHEELCILKRSYEKLQKKQMREFRGNTKNHREDRSEIERLTAKIEEFRQKSLDWEKQRLIYQQQVSSLEAQRKALAEQSEIIQAQLVNRKQKLESVELSSQSEIQHLSSKLERANDTICANELEIERLTMRVNDLVGTSMTVLQEQQQKEEKLRESEKLLEALQEEKRELKAALQSQENLIHEARIQKEKLQEKVKATNTQHAVEAISLESVSATCKQLSQELMEKYEELKRMEAHNNEYKAEIKKLKEQILQGEQSYSSALEGMKMEISHLTQELHQRDITIASTKGSSSDMEKRLRAEMQKAEDKAVEHKEILDQLESLKLENRHLSEMVMKLELGLHECSLPVSPLGSIATRFLEEEELRSHHILERLDAHIEELKRESEKTVRQFTALK

SEQ ID NO: 250 - protein, 960 aa, Homo sapiens
YFEVNITMSSGLWSQEKVTSPYWEERIFYLLLQECSVTDKQTQKLLKVPKGSIGQYIQDRSVGHSRIPSAKGKKNQIGLKILEQPHAVLFVDEKDVVEINEKFTELLLAITNCEERFSLFKNRNRLSKGLQIDVGCPVKVQLRSGEEKFPGVVRFRGPLLAERTVSGIFFGVELLEEGRGQGFTDGVYQGKQLFQCDEDCGVFVALDKLELIEDDDTALESDYAGPGDTMQVELPPLEINSRVSLKVGETIESGTVIFCDVLPGKESLGYFVGVDMDNPIGNWDGRFDGVQLCSFACVESTILLHINDIIPESVTQERRPPKLAFMSRGVGDKGSSSHNKPKATGSTSDPGNRNRSELFYTLNGSSVDSQPQSKSKNTWYIDEVAEDPAKSLTEISTDFDRSSPPLQPPPVNSLTTENRFHSLPFSLTKMPNTNGSIGHSPLSLSAQSVMEELNTAPVQESPPLAMPPGNSHGLEVGSLAEVKENPPFYGVIRWIGQPPGLNEVLAGLELEDECAGCTDGTFRGTRYFTCALKKALFVKLKSCRPDSRFASLQPVSNQIERCNSLAFGGYLSEVVEENTPPKMEKEGLEIMIGKKKGIQGHYNSCYLDSTLFCLFAFSSVLDTVLLRPKEKNDVEYYSETQELLRTEIVNPLRIYGYVCATKIMKLRKILEKVEAASGFTSEEKDPEEFLNILFHHILRVEPLLKIRSAGQKVQDCYFYQIFMEKNEKVGVPTIQQLLEWSFINSNLKFAEAPSCLIIQMPRFGKDFKLFKKIFPSLELNITDLLEDTPRQCRICGGLAMYECRECYDDPDISAGKIKQFCKTCNTQVHLHPKRLNHKYNPVSLPKDLPDWDWRHGCIPCQNMELFAVLCIETSHYVAFVKYGKDDSAWLFFDSMADRDGGQNGFNIPQVTPCPEVGEYLKMSLEDLHSLDSRRIQGCARRLLCDAYMCMYQSPTMSLYK

SEQ ID NO: 251 - protein, 742 aa, Homo sapiens
MGSENSALKSYTLREPPFTLPSGLAVYPAVLQDGKFASVFVYKRENEDKVNKAAKHLKTLRHPCLLRFLSCTVEADGIHLVTERVQPLEVALETLSSAEVCAGIYDILLALIFLHDRGHLTHNNVCLSSVFVSEDGHWKLGGMETVCKVSQATPEFLRSIQSIRDPASIPPEEMSPEFTTLPECHGHARDAFSFGTLVESLLTILNEQVSADVLSSFQQTLHSTLLNPIPKCRPALCTLLSHDFFRNDFLEVVNFLKSLTLKSEEEKTEFFKFLLDRVSCLSEELIASRLVPLLLNQLVFAEPVAVKSFLPYLLGPKKDHAQGETPCLLSPALFQSRVIPVLLQLFEVHEEHVRMVLLSHIEAYVEHFTQEQLKKVILPQVLLGLRDTSDSIVAITLHSLAVLVSLLGPEVVVGGERTKIFKRTAPSFTKNTDLSLEDSPMCVVCSHHSQISPILENPFSSIFPKCFFSGSTPINSKKHIQRDYYNTLLQTGDPFSQPIKFPINGLSDVKNTSEDSENFPSSSKKSEEWPDWSEPEEPENQTVNIQIWPREPCDDVKSQCTTLDVEESSWDDCEPSSLDTKVNPGGGITATKPVTSGEQKPIPALLSLTEESTPWKSSLPRKISLVQRGDDADQIEPPKVSSQERPLKVPSELGLGEEFTIQVKKKPVKDPEMDWFADMIPEIKPSAAFLILPELRTEMVPKKDDVSPVMQFSSKFAAAEITEGEAEGWEEEGELNWEDNNW

SEQ ID NO: 252 - protein, 945 aa, Homo sapiens
MGARSGARGALLLALLLCWDPRLSQAGTDSGSEVLPDSFPSAPAEPLPYFLQEPQDAYIVKNKPVELRCRAFPATQIYFKCNGEWVSQNDHVTQEGLDEATGLRVREVQIEVSRQQVEELFGLEDYWCQCVAWSSAGTTKSRRAYVRIAYLRKNFDQEPLGKEVPLDHEVLLQCRPPEGVPVAEVEWLKNEDVIDPTQDTNFLLTIDHNLIIRQARLSDTANYTCVAKNIVAKRRSTTATVIVYVNGGWSSWAEWSPCSNRCGRGWQKRTRTCTNPAPLNGGAFCEGQAFQKTACTTICPVDGAWTEWSKWSACSTECAHWRSRECMAPPPQNGGRDCSGTLLDSKNCTDGLCMQNKKTLSDPNSHLLEASGDAALYAGLVVAIFVVVAILMAVGVVVYRRNCRDFDTDITDSSAALTGGFHPVNFKTARPSNPQLLHPSVPPDLTASAGIYRGPVYALQDSTDKIPMTNSPLLDPLPSLKVKVYSSSTTGSGPGLADGADLLGVLPPGTYPSDFARDTHFLHLRSASLGSQQLLGLPRDPGSSVSGTFGCLGGRLSIPGTGVSLLVPNGAIPQGKFYEMYLLINKAESTLPLSEGTQTVLSPSVTCGPTGLLLCRPVILTMPHCAEVSARDWIFQLKTQAHQGHWEEVVTLDEETLNTPCYCQLEPRACHILLDQLGTYVFTGESYSRSAVKRLQLAVFAPALCTSLEYSLRVYCLEDTPVALKEVLELERTLGGYLVEEPKPLMFKDSYHNLRLSLHDLPHAHWRSKLLAKYQEIPFYHIWSGSQKALHCTFTLERHSLASTELTCKICVRQVEGEGQIFQLHTTLAETPAGSLDTLCSAPGSTVTTQLGPYAFKIPLSIRQKICNSLDAPNSRGNDWRMLAQKLSMDRYLNYFATKASPTGVILDLWEALQQDDGDLNSLASALEEMGKSEMLVAVATDGDC

SEQ ID NO: 253 - protein, 538 aa, Homo sapiens
MAAAAPVAADDDERRRRPGAALEDSRSQEGANGEAESGELSRLRAELAGALAEMETMKAVAEVSESTKAEAVAAVQRQCQEEVASLQAILKDSISSYEAQITALKQERQQQQQDCEEKERELGRLKQLLSRAYPLDSLEKQMEKAHEDSEKLREIVLPMEKEIEELKAKLLRAEELIQEIQRRPRHAPSLHGSTELLPLSRDPSPPLEPLEELSGDGGPAAEAFAHNCDDSASISSFSLGGGVGSSSSLPQSRQGLSPEQEETASLVSTGTLVPEGIYLPPPGYQLVPDTQWEQLQTEGRQLQKDLESVSRERDELQEGLRRSNEDCAKQMQVLLAQVQNSEQLLRTLQGTVSQAQERVQLQMAELVTTHKCLHHEVKRLNEENQGLRAEQLPSSAPQGSQQEQGEEESLPSSVPELQQLLCCTRQEARARLQAQEHGAERLRIEIVTLREALEEETVARASLEGQLRVQREETEVLEASLCSLRTEMERVQQEQSKAQLPDLLSEQRAKVLRLQAELETSEQCRGISCDCPRPCRCA

SEQ ID NO: 254 - protein, 397 aa, Homo sapiens
MAPISLSWLLRLATFCHLTVLLAGQHHGVTKCNITCSKMTSKIPVALLIHYQQNQASCGKRAIILETRQHRLFCADPKEQWVKDAMQHLDRQAAALTRNGGTFEKQIGEVKPRTTPAAGGMDESVVLEPEATGESSSLEPTPSSQEAQRALGTSPELPTGVTGSSGTRLPPTPKAQDGGPVGTELFRVPPVSTAATWQSSAPHQPGPSLWAEAKTSEAPSTQDPSTQASTASSPAPEENAPSEGQRVWGQGQSPRPENSLEREEMGPVPAHTDAFQDWGPGSMAHVSVVPVSSEGTPSREPVASGSWTPKAEEPIHATMDPQRLGVLITPVPDAQAATRRQAVGLLAFLGLLFCLGVAMFTYQSLQGCPRKMAGEMAEGLRYIPRSCGSNSYVLVPV

We claim:

1. A method for providing a patient diagnosis for breast cancer, comprising the steps of:
(a) determining the level of expression of one or more genes or gene products in a first biological sample taken from the patient;
(b) determining the level of expression of one or more genes or gene products in at least a second biological sample taken from a normal patient sample; and
(c) comparing the level of expression of one or more genes or gene products in the first biological sample with the level of expression of one or more genes or gene products in the second biological sample;
wherein a change in the level of expression of one or more genes or gene products in the first biological sample compared to the level of expression of one or more genes or gene products in the second biological sample is a diagnostic of the disease.

2. The method of claim 1, wherein one or more genes are selected from the group consisting of SEQ ID NOs: 1-127.

3. The method of claim 1, wherein one or more gene products are polypeptides selected from the group consisting of SEQ ID NOs: 128-254.

4. A method for distinguishing between normal and disease tissues, comprising the steps of:
(a) determining the level of expression of one or more genes or gene products in a first biological sample of a disease tissue;
(b) determining the level of expression of one or more genes or gene products in at least a second biological sample taken from normal tissue; and
(c) comparing the level of expression of one or more genes or gene products in the first biological sample with the level of expression of one or more genes or gene products in the second biological sample;
wherein a change in the level of expression of one or more genes or gene products in the first biological sample compared to the level of expression of one or more genes or gene products in the second biological sample is indicative of a disease state.

5. The method of claim 4, wherein one or more genes are selected from the group consisting of SEQ ID NOs: 1-127.

6. The method of claim 4, wherein one or more gene products are polypeptides selected from the group consisting of SEQ ID NOs: 128-254.

7. A method to monitor the response of a patient being treated for breast cancer by administering a anti-cancer agent, comprising the steps of:
(a) determining the level of expression of one or more genes or gene products in a first biological sample taken from the patient prior to treatment with the anti-cancer agent;
(b) determining the level of expression of one or more genes or gene products in at least a second biological sample taken from the patient subsequent to the treatment with the anti-cancer agent; and
(c) comparing the level of expression of one or more one genes(s) or gene products in the second biological sample with the level of expression of one or more one genes(s) or gene products in the first biological sample;
wherein a change in the level of expression of one or more genes or gene products in the second biological sample compared to the level of expression of one or more genes or gene products in the first biological sample indicates the efficacy of the treatment with the anti-cancer agent.

8. The method of claim 7, wherein one or more genes are selected from the group consisting of SEQ ID NOs: 1-127.

9. The method of claim 7, wherein one or more gene products are polypeptides selected from the group consisting of SEQ ID NOs: 128-254.

10. A method for identifying a compound useful for the treatment of breast cancer comprising the steps of:
(a) analyzing the level of expression of one or more genes and/or gene products in a cell or tissue sample prior to treatment with the compound;
(b) analyzing the level of expression of one or more genes and/or gene products in a cell or tissue sample subsequent to treatment with the compound;
wherein a variation in the expression level of the gene and/or gene product is indicative of drug efficacy.

11. The method of claim 10, wherein one or more genes are selected from the group consisting of SEQ ID NOs: 1-127.

12. The method of claim 10, wherein one or more gene products are polypeptides selected from the group consisting of SEQ ID NOs: 128-254.

13. An array for distinguishing between normal and disease tissues, comprising two or more probes corresponding to two or more genes selected from the group consisting of SEQ ID NOs: 1-127.

14. An array for distinguishing between normal and disease tissues, comprising two or more polypeptides selected from the group consisting of SEQ ID NOs: 128-254.
